(19) United States
(12) Patent Application Publication
(10) Pub. No.: US 2022/0098646 A1
(43) Pub. Date: Mar. 31, 2022

(54) DETECTION METHOD OF PAN-RESISTANT K. PNEUMONIAE, SCREENING METHOD OF ANTIMICROBIAL AGENTS, AND RECORDING MEDIA AND DATABASE

(71) Applicant: TEIKYO UNIVERSITY, Tokyo (JP)

(72) Inventors: Satoshi NISHIDA, Tokyo (JP); Yasuo ONO, Tokyo (JP)

(73) Assignee: TEIKYO UNIVERSITY, Tokyo (JP)

(21) Appl. No.: 17/423,634

(22) PCT Filed: Nov. 15, 2019
(86) PCT No.: PCT/JP2019/044965

§ 371 Date: Jul. 16, 2021

(30) Foreign Application Priority Data
Jan. 17, 2019 (JP) 2019-006012

(51) Int. Cl. C12Q 1/689; C12Q 1/18

(52) U.S. Cl. CPC C12Q 1/689; C12Q 1/18

(57) ABSTRACT

A detection method for pan-resistant K. pneumoniae comprising of: performing complete genome analysis of the bacteria contained in the sample; and comparing a nucleotide sequence contained in the obtained complete genome with nucleotide sequences of SEQ ID NO: 1 or 2, and determining whether or not the bacteria in the sample is pan-resistant K. pneumoniae based on the rate of agreement.

### TECHNICAL FIELD

[0001] The present invention relates to a detection method for pan-resistant K. pneumoniae, a screening method for antimicrobial agents, and recording media and database.

### BACKGROUND ART

[0002] Multidrug-resistant (MDR) organisms such as carbapenemase- and extended-spectrum β-lactamase (ESBL)-producing organisms are highly prevalent in certain regions of the world (non-patent literature 1 and 2). In particular, Klebsiella pneumoniae carbapenemase (KPC)-producing Gram-negative organisms are an increasing problem worldwide (non-patent literature 3 and 4), and travelers from endemic areas are particularly at risk of being infected with MDR bacteria. Infection with carbapenem-resistant Enterobacteriaceae is a serious clinical problem because it is difficult to treat using conventional antimicrobial agents.

[0003] In Japan, less than 1% of hospital-associated Enterobacteriaceae infections are carbapenem-resistant (non-patent literature 6). Usually, resistance to carbapenems is mediated by imipenemase (IMP)-type metallo-β-lactamases or by overexpression of AmpC cephalosporinases in combination with porin mutations. Carbapenemases, including KPC, New Delhi metallo-β-lactamase (NDM), and oxacillinase-48 (OXA-48), are increasingly common, however their detection remains sporadic (non-patent literature 4, 7).

[0004] In Asia, KPC isolates are limited to East Asia, including Southeast Asia (non-patent literature 3 and 7). The first KPC-producing K. pneumoniae reported in Japan (in 2014) was isolated from a patient originally hospitalized in Brazil (non-patent literature 8). KPC-producing K. pneumoniae is often MDR and poses serious problems in terms of clinical treatment and infection control.

[0005] Furthermore, for example, ESKAPE (Enterococcus faecium, Staphylococcus aureus, Klebsiella pneumoniae, Acinetobacter baumannii, Pseudomonas aeruginosa, Enterobacter sp.) pathogens frequently acquire drug resistance. Depending on the number of drugs to which the organism is resistant, they are categorized as MDR, extensively drug-resistant (XDR), or pandrug-resistant (PDR), and pathogens have pandrug-resistant (PDR) are not susceptible to any available antimicrobial agents (non-patent literature 9, 10).

[0006] There are currently no reports on the genetic structure and systems of drug resistance, because whole-genome sequences of pathogens that have acquired PDR are rarely available.

### CITATION LIST

### Non-Patent Literature

[0007] [NPL 1] Jacoby G A, Munoz-Price L S. The New β-Lactamases. N. Engl. J. Med. 2005; 352:380-391.
[0008] [NPL 2] Wellington E M, Boxall A B, Cross P, et al. The role of the natural environment in the emergence of antibiotic resistance in Gram-negative bacteria, Lancet Infect. Dis. 2013; 13:155-165.
[0009] [NPL 3] Munoz-Price L S, Poirel L, Bonomo R A, et al. Clinical epidemiology of the global expansion of Klebsiella pneumoniae carbapenemases. Lancet Infect. Dis. 2013; 13:785-796.
[0010] [NPL 4] Nordmann P, Poirel L. The difficult-to-control spread of carbapenemase producers among Enterobacteriaceae worldwide. Clin. Microbiol. Infect. 2014; 20:821-830.
[0011] [NPL 5] van der Bij A K, Pitout J D D. The role of international travel in the worldwide spread of multiresistant Enterobacteriaceae. J. Antimicrob. Chemother. 2012; 67:2090-2100.
[0012] [NPL 6] Infectious Disease Surveillance Center NI of ID. Carbapenem-resistant Enterobacteriaceae Infection, Japan. Infect. Agents Surveill. Rep. 2014; 35:281.
[0013] [NPL 7] Lee C-R, Lee J H, Park K S, Kim Y B, Jeong B C, Lee S H. Global Dissemination of Carbapenemase-Producing Klebsiella pneumoniae: Epidemiology, Genetic Context, Treatment Options, and Detection Methods. Front. Microbiol. 2016: 7:895.
[0014] [NPL 8] Saito R, Takahashi R, Sawabe E. et al. First report of KPC-2 Carbapenemase-producing Klebsiella pneumoniae in Japan. Antimicrob. Agents Chemother. 2014; 58:2961-3.
[0015] [NPL 9] Falagas M E, Bliziotis I A. Pandrug-resistant Gram-negative bacteria: the dawn of the post-antibiotic era? Int. J. Antimicrob. Agents 2007; 29:630-636.
[0016] [NPL 10] Magiorakos A-P, Srinivasan A, Carey R B, et al. Multidrug-resistant, extensively drug-resistant and pandrug-resistant bacteria: an international expert proposal for interim standard definitions for acquired resistance. Clin. Microbiol. Infect. 2012; 18:268-281.
[0017] [NPL 11] Jolley K A, Maiden M C J. BIGSdb: Scalable analysis of bacterial genome variation at the population level. BMC Bioinformatics 2010; 11:595.
[0018] [NPL 12] Jia B, Raphenys A R, Alcock B, et al. CARD 2017: expansion and model-centric curation of the comprehensive antibiotic resistance database. Nucleic Acids Res. 2017; 45:D566-D573.
[0019] [NPL 13] Amdt D, Grant J R, Marcu A, et al. PHASTER: a better, faster version of the PHAST phage search tool. Nucleic Acids Res. 2016; 44:W16-W21.
[0020] [NPL 14] Sullivan M J, Petty N K, Beatson S A. Easyfig: a genome comparison visualizer. Bioinformatics 2011; 27:1009-1010.
[0021] [NPL 15] Alikhan N-F, Petty N K, Ben Zakour N L, Beatson S A. BLAST Ring Image Generator (BRIG): simple prokaryote genome comparisons. BMC Genomics 2011; 12:402.
[0022] [NPL 16] Darling A E, Mau B, Pema N T. progressive Mauve: Multiple Genome Alignment with Gene Gain, Loss and Rearrangement. PLoS One 2010; 5:14
[0023] [NPL 17] Zhang Z. Schwartz S. Wagner L, Miller W. A Greedy Algorithm for Aligning DNA Sequences. J. Comput. Biol. 2000; 7:203-214.
[0024] [NPL 18] Xiang D-R, Li J-J. Sheng Z-K, et al. Complete Sequence of a Novel IncR-F33:A-:B-Plasmid, pKP1034, Harboring fosA3, blaKPC-2, blaCTX-M-65, blaSHV-12, and rmtB from an Epidemic Klebsiella pneumoniae Sequence Type 11 Strain in China. Antimicrob. Agents Chemother. 2015; 60:1343-8.
[0025] [NPL 19] Liu P. Li P, Jiang X, et al. Complete Genome Sequence of Klebsiella pneumoniae subsp. pneumoniae HS11286, a Multidrug-Resistant Strain Isolated from Human Sputum. J. Bacteriol. 2012; 194:1841-1842.
[0026] [NPL 20] Lam M M C, Wick R R, Wyres K L, et al. Genetic diversity, mobilization and spread of the yersiniabactin-encoding mobile element ICEKp in Klebsiella pneumoniae populations. Microb. Genomics 2018;
[0027] [NPL 21] Blankschien M D, Potrykus K, Grace E, et al. TraR, a Homolog of a RNAP Secondary Channel Interactor, Modulates Transcription. PLoS Genet. 2009; 5:e1000345.
[0028] [NPL 22] Gopalkrishnan S, Ross W, Chen A Y, Gourse R L. TraR directly regulates transcription initiation by mimicking the combined effects of the global regulators DksA and ppGpp. Proc. Natl. Acad. Sci. 2017; 114:E5539-E5548.
[0029] [NPL 23] Gu D, Dong N, Zheng Z, et al. A fatal outbreak of ST11 carbapenem-resistant hypervirulent Klebsiella pneumoniae in a Chinese hospital: a molecular epidemiological study. Lancet Infect. Dis. 2017;
[0030] [NPL 24] Huang Y-H, Chou S-H, Liang S-W, et al. Emergence of an XDR and carbapenemase-producing hypervirulent Klebsiella pneumoniae strain in Taiwan. J. Antimicrob. Chemother. 2018; 73:2039-2046.
[0031] [NPL 25] Shoma S, Kamruzzaman M. Ginn A N, Iredell J R, Partridge S R. Characterization of multidrug-resistant Klebsiella pneumoniae from Australia carrying blaNDM-1. Diagn. Microbiol. Infect. Dis. 2014; 78:93-97.
[0032] [NPL 26] Zhang Y, Jiang X, Wang Y, et al. Contribution of β-Lactamases and Porin Proteins OmpK35 and OmpK36 to Carbapenem Resistance in Clinical Isolates of KPC-2-Producing Klebsiella pneumoniae. Antimicrob. Agents Chemother. 2014; 58:1214-1217.
[0033] [NPL 27] Deguchi T, Fukuoka A, Yasuda M, Nakano M, Ozeki S, Kanematsu E, et al. Alterations in the GyrA subunit of DNA gyrase and the ParC subunit of topoisomerase IV in quinolone-resistant clinical isolates of Klebsiella pneumoniae. Antimicrob Agents Chemother 1997; 41:699-701.
[0034] [NPL 28] Sheng Z-K, Hu F, Wang W, Guo Q, Chen Z, Xu X, et al. Mechanisms of Tigecycline Resistance among Klebsiella pneumoniae Clinical Isolates. Antimicrob Agents Chemother 2014; 58:6982-5. doi:10.1128/AAC.03808-14.

### SUMMARY OF INVENTION

### Technical Problem

[0035] The inventors obtained a novel PDR K. pneumoniae ST11 isolate as one of the three distinct carbapenem-resistant Gram-negative bacteria from a patient transferred from a hospital in Jakarta, Indonesia, and performed a complete genome analysis of this strain.

[0036] The present invention was accomplished in consideration of the aforementioned situation, and an object thereof is to provide a detection method for pan-resistant K. pneumoniae, a screening method for antimicrobial agents, and recording media and database by using a novel PDR K. pneumoniae and sequence information from this complete genome analysis.

### Solution to Problem

[0037] The present invention is characterized by the following.

[0038] A detection method for pan-resistant K. pneumoniae comprising of:

[0039] performing complete genome analysis of the bacteria contained in the sample; and

[0040] comparing a nucleotide sequence contained in the obtained complete genome with nucleotide sequences of SEQ ID NO: 1 or 2, and determining whether or not the bacteria in the sample is pan-resistant K. pneumoniae based on the rate of agreement.

[0041] A screening method for antimicrobial agents comprising of:

[0042] supplying a sample containing a candidate antimicrobial agent to pan-resistant K. pneumoniae which has chromosomal DNA comprising of the nucleotide sequence of SEQ ID NO: 1 and plasmid DNA comprising of the nucleotide sequence of SEQ ID NO: 2.

[0043] A recording media and database characterized by the storage of nucleotide sequence information of SEQ ID NO: 1 or 2.

### Advantageous Effects of Invention

[0044] According to the detection method for pan-resistant K. pneumoniae of the present invention, it is possible to accurately determine whether the bacteria in a sample are pan-resistant K. pneumoniae or not. According to the screening method for antimicrobial agents of the present invention, antimicrobial agents are effective against not only pan-resistant K. pneumoniae but also other bacteria can be reliably screened. According to recording media and database of the present invention enables the use of the sequence information of pan-resistant K. pneumoniae for various types of analysis, research, etc. and commercial use.

### BRIEF DESCRIPTION OF DRAWINGS

[0045] FIG. 1 This figure shows the phylogenetic tree of K. pneumoniae chromosomes. The phylogenetic tree of the complete K. pneumoniae chromosome sequence constructed from the complete genome is shown with single nucleotide polymorphisms using PathoBacTyper.

[0046] FIG. 2 This figure shows the phylogenetic analysis of K. pneumoniae ST11 isolates. (a) Phylogenetic tree of 48 K. pneumoniae ST11 isolates constructed by complete genome single nucleotide polymorphism analysis using PathoBacTyper. Black circles indicate strains reported to harbor virulence plasmids. (b) Comparative analysis of the plasmids possessed by K. pneumoniae ST11 isolates. Easyfig is used to compare the plasmid sequences. The top, middle, and bottom sequences represent pKP1034, p69-2, and pTK1401.

[0047] FIG. 3 This figure shows the comparative genomic analysis of K. pneumoniae ST11 isolates KP69 and TK1401. Chromosomal sequences of KP69 and TK1401 are compared using BLAST Ring Image Generator (BRIG).

[0048] FIG. 4 This figure shows the comparative genomic analysis of K. pneumoniae ST11 isolates KP69 and TK1401. The plasmid sequences of KP69 and TK1401 are compared using BRIG.

[0049] FIG. 5 This figure shows the comparative analysis of the genomes of K. pneumoniae ST11 isolates. (a) shows the comparative analysis of the chromosomes of K. pneumoniae ST11 isolates JM45, HS11286, KP69, and TK1401 (performed using ProgressiveMauve). The locations of the prophage and ItrA (group 11 intron reverse transcriptase) genes are indicated by arrows. (b) shows the comparative analysis of plasmids possessed by K. pneumoniae ST11 isolates. Easyfig was used to compare the plasmid sequences. The top, middle, and bottom sequences represent pKP1034, pTK1401, and pKSH203-KPC.

[0050] FIG. 6 This figure shows the phylogenetic tree of the complete K. pneumoniae plasmid sequence. parsnp is used to show single nucleotide polymorphisms.

### DESCRIPTION OF EMBODIMENTS

[0051] The inventors have conducted a whole-genome analysis of X. pneumoniae isolated from Japanese patients with a history of treatment in Indonesia and determined the nucleotide sequence of 5.5 Mb of chromosomal DNA (Sequence Listing: SEQ ID NO: 1) and 128 kb of plasmid DNA (Sequence Listing: SEQ ID NO: 2).

[0052] This K. pneumoniae has 16 drug resistance genes to 9 classes of antimicrobial agents, and has been confirmed to be pan-resistant (PDR), in which commercially available antimicrobial agents are ineffective.

[0053] An embodiment of the present invention of the method for detecting pan-resistant K. pneumoniae will be explained as follows.

[0054] A detection method for pan-resistant K. pneumoniae of the present invention comprising the following steps of:

[0055] (1) performing complete genome analysis of the bacteria contained in the sample; and

[0056] (2) comparing the nucleotide sequence contained in the obtained complete genome with nucleotide sequences of SEQ ID NO: 1 or 2, and determining whether or not the bacteria in the sample is pan-resistant K. pneumoniae based on the rate of agreement.

[0057] In step (1), for example, genomic DNA is isolated from a sample collected from a patient or the environment using known methods, and the genome of the bacteria is analyzed using known methods (e.g., MiSeq, Genome Analyzer series, HiSeq series from Illumina, ion proton, ion PGM, Solid series from Life technologies, GS series from Roche, PacBio RS series from PacBio, etc.). This step provides sequence information on the complete genome of the bacteria contained in the sample.

[0058] In step (2), the nucleotide sequence of the complete genome obtained in step (1) above is compared with the nucleotide sequence of SEQ ID NO: 1 or 2, and whether the bacteria in the sample is pan-resistant K. pneumoniae or not is determined based on the rate of agreement.

[0059] The complete genome sequence information entered into the computer can be compared with the sequence of SEQ ID NO: 1 or 2 by processing commercially available software (e.g., calculating the rate of agreement). For example, if the rate of agreement of the nucleotide sequence is 99.9% or higher, it can be determined that the bacteria in the sample is pan-resistant K. pneumoniae. In addition, the 16 drug resistance genes possessed by pan-resistant K. pneumoniae found by the inventors can be focused on in the determination.

[0060] In addition, the present invention also provides a recording media or database in which the sequence information of SEQ ID NO: 1 or 2 is stored. The recording media is not particularly limited, but examples may include magnetic storage media, such as floppy disks, hard disk storage media and magnetic tapes; optical storage media, such as CD-ROMs; and electrical storage media, such as RAM and ROM. The database can also be exemplified in the form of a computer-based system that has sequence information of SEQ ID NO: 1 or 2 stored in data storage means.

[0061] Next, the screening method for antimicrobial agents of the present invention will be explained.

[0062] A screening method for antimicrobial agents of the present invention comprises of supplying a sample containing a candidate antimicrobial agent to pan-resistant K. pneumoniae which has chromosomal DNA comprising of the nucleotide sequence of SEQ ID NO: 1 and plasmid DNA comprising of the nucleotide sequence of SEQ ID NO: 2.

[0063] The pan-resistant K. pneumonia& found by the inventors has chromosomal DNA consisting of the SEQ ID NO: 1 and plasmid DNA consisting of the SEQ ID NO: 2, and contains 16 drug resistance genes to 9 classes of antimicrobial agents. Therefore, the commercially available antimicrobial agents are ineffective against this pan-resistant K. pneumoniae. Therefore, samples containing candidate antimicrobial agents that are expected to be effective against pan-resistant K. pneumoniae are given to pan-resistant K. pneumoniae. If, for example, a decrease in the number of surviving pan-resistant K. pneumoniae can be confirmed, it can be evaluated as an antimicrobial agent effective not only against pan-resistant K. pneumoniae but also against other bacterium. In this way, the pan-resistant K. pneumoniae found by the inventors can be used to screen for new active ingredients for antimicrobial agents.

[0064] Furthermore, the sequence information obtained from this genome analysis of K. pneumoniae (SEQ ID NO: 1 and 2) or representative fragments thereof can be used for various analyses, studies, etc., by those skilled in the art.

[0065] For example, primers and probes used to detect pan-resistant K. pneumoniae found by the present inventors can be designed based on the sequence information shown in SEQ ID NO: 1 and 2. For example, the sequence information shown in SEQ ID NO: 1 and 2 can be used to establish methods for the specific detection of genomic DNA, such as PCR (Polymerase Chain Reaction) using primer sets, Southern hybridization method using probes, and FISH (Fluorescent in situ hybridization) method.

[0066] The method for detecting pan-resistant K. pneumoniae, the screening method for antimicrobial agents, and the recording medium and database are not limited to the above embodiments.

### EXAMPLE

[0067] The invention is described in more detail by means of examples below, but the invention is not limited in any way to these examples.

[0068] <1> Acquisition of the Isolate

[0069] The K. pneumoniae isolate TK1401 was previously identified from fecal samples, tracheal samples (including aspirate and sputum), and pharyngeal and wound swab from a patient in a laboratory stool and swab surveillance-screening program for infection control. The patient was a 74-year-old Japanese man with a history of hospitalization at a hospital in Jakarta, Indonesia.

[0070] <2> Culture and Isolation of Bacterial Strains

[0071] The screening samples were cultured on CHROM Agar mSuperCARBA (Kanto Chemical, Tokyo, Japan) and stored in glycerol at −80° C. Frozen stocks of isolates were streaked on Lysogeny broth (LB) (Miller) agar (Becton Dickinson, Franklin Lakes, N.J., USA) and incubated at 37° C. A single colony of an isolate was grown at 37° C. in LB (Miller) (Sigma-Aldrich, St Louis, Mo., USA) prior to liquid culture in a Bio-shaker BR-40LF (Taitec, Tokyo, Japan). Genomic DNA was isolated from cells of K. pneumoniae TK1401 using the DNeasy Blood & Tissue Kit (QIAGEN, Hilden, Germany).

[0072] <3> Antimicrobial Susceptibility Testing

[0073] Testing was performed using a MicroScan WalkAway apparatus (Beckman Coulter, Brea, Calif., USA). The minimal inhibitory concentration (MIC) of colistin was confirmed using the Etest (bioMérieux, Marcy l'Etoile, France) and the broth microdilution method. Antimicrobial susceptibility was defined according to breakpoints listed in the Clinical and Laboratory Standards Institute (CLSI) guidelines (M100-S24).

[0074] <4> Genome Analysis

[0075] Genomic DNA was isolated from cells of K. pneumoniae TK1401 using the DNeasy Blood & Tissue Kit (QIAGEN, Hilden, Germany). The complete genome sequence was determined by single-molecule real-time sequencing (SMRT) using PacBio RSII (Pacific Biosciences, Menlo Park, Calif., USA). A 1,896 Mb sequence was obtained, with 210,166 reads and an N₅₀ read length of 12,144 bp. Hierarchical Genome Assembly Process version 3 was used for the assembly of two circular contigs. The complete chromosome and plasmid sequences comprised 5,488,304 bp with 57.4% GC content, and 128,638 bp with 54.4% GC content, respectively (SEQ ID NO: 1 and 2). DDBJ Fast Annotation and Submission Tool beta identified 173 protein-coding regions in the plasmid and 5.156 protein-coding regions in the chromosome, with 9 copies of 5S, 8 copies of 16S, and 23S rRNA, and 86 tRNAs.

[0076] Genomic sequences were analyzed using the Bacterial Isolate Genome Sequence Database (BIGSdb; http://bigsdb.pasteur.fr/klebsiella/) (NPL 11), the Comprehensive Antibiotic Resistance Database (CARD; http://arpcard.mcmaster.ca) (NPL 12), and the Phage Search Tool Enhanced Release (PHASTER; http://phaster.ca) (NPL 13), and were compared using Easyfig v2.2.2 (NPL 14), the BLAST Ring Image Generator (BRIG) (NPL 15), and progressive Mauve (NPL 16). Genome similarity was analyzed using NCBI BLASTN 2.10.0 (NPL 17). Phylogenetic analysis was performed with whole-genome single nucleotide polymorphism (wgSNP) analysis using PathoBacTyper (http://hast.nhr.org.tw/PathoBacTyper/) and Harvest v1.1.2. A phylogenetic tree was drawn using FigTree v1.4.3. Genomes sequences were deposited in DDBJ with the BioProject number PRJDB8036.

[0077] <5> Results

### (Antimicrobial Susceptibility Test)

[0078] The results of the antimicrobial susceptibility test are shown in Table 1.

TABLE 1

| | K. pneumoniae | |
|---|---|---|
| Antimicrobial agent^{a} | TK1401 | Resistance genes^{b} |
| Penicillins | | |
| Ampicillin | >16 | bla_{TEM-1B}, bla_{SHV-12}, bla_{SHV} [symbol] bla_{CTX-M-65}, bla_{KPC-2} |
| Piperacillin | >64 | bla_{TEM-1B}, bla_{SHV-12}, bla_{SHV} [symbol] bla_{CTX-M-65}, bla_{KPC-2} |
| Amoxicillin | >16 | bla_{TEM-1B}, bla_{SHV-12}, bla_{SHV} [symbol] bla_{CTX-M-65}, bla_{KPC-2} |
| Cephalosporins | | |
| Cefazolin | >16 | bla_{TEM-1B}, bla_{SHV-12}, bla_{SHV} [symbol] bla_{CTX-M-65}, bla_{KPC-2} |
| Cefotiam | >16 | bla_{TEM-1B}, bla_{SHV-12}, bla_{SHV} [symbol] bla_{CTX-M-65}, bla_{KPC-2} |
| Cefotaxim | >2 | bla_{CTX-M-65}, bla_{KPC-2} |
| Ceftazidime | >16 | bla_{CTX-M-65}, bla_{KPC-2} |
| Cefepime | >2 | bla_{CTX-M-65}, bla_{KPC-2} |
| Ceftriaxone | >16 | bla_{CTX-M-60} |
| Cefozopran | >16 | bla_{KPC-2} |
| Cefmerazole | >32 | bla_{KPC-2} |
| Cefaclor | >16 | bla_{KPC-2} |
| Cefdinir | >2 | bla_{KPC-2} |
| Cefpodoxime | >4 | bla_{KPC-2} |
| Flomoxef | >32 | bla_{KPC-2} |
| Carbapenems | | |
| Doripenem | >8 | bla_{KPC-2} ompK36 variant |
| Imipenem | >8 | bla_{KPC-2} ompK36 variant |
| Meropenem | >8 | bla_{KPC-2} ompK36 variant |
| Monobactams | | |
| Axtreonam | >16 | bla_{CTX-M-65} |
| Penams | | |
| Sulbactam/cephoperazon | >32 | bla_{KPC-2} |
| Tazobactam/piperacillin | >64 | bla_{KPC-2} |
| Fluoroquinolones | | |
| Ciprofloxacin | >2 | oqxAB, gyrAD87G, perCS80I, ranmRT162I, ompK35 FS_{—}aa29 |
| Levofloxacin | >4 | oqxAB, gyrAD87G, perCS80I, ranmRT162I, ompK35 FS_{—}aa29 |
| Aminoglycosides | | |
| Gentamicin | >8 | aadA2, rmtB |
| Amikacin | >32 | aadA2, rmtB |
| Tobramycin | >8 | aadA2, rmtB |
| Arbekacin^{b} | >256 | |
| Tetracyclines | | |
| Minocycline^{b} | 256 | ramRT162I, ampK35 FS_{—}aa29 |
| Tigecycline^{b} | 16 | ramRT162I |
| Polymyxins | | |
| Colistin^{b} | 64 | mgrB FS_{—}aa8 |
| Polymyxin B^{b} | 64 | mgrB FS_{—}aa8 |
| Other | | |
| Trimethoprim/sulfamethoxazole | >2 | snt1 |
| Fosfomycin^{b} | >256 | fosA, fosA3 |
| Chloramphenicol^{b} | >256 | ramRT162I, ampK35 FS_{—}aa29, cntA2 |

^{a}Minimum inhibitory concentration (mg/L) values in bold represent resistant or non-susceptible values.
^{b}Broth microdilution method c, Resistance genes in bold are chromosomal genes. [symbol]
indicates data missing or illegible when filed

[0079] The isolate was not susceptible to penicillins, cephalosporins, carbapenems, monobactams, aminoglycosides, fluoroquinolones, polymyxins, tetracyclines. glycylcyclines, phenicols, trimethoprim-sulfamethoxazole, or fosfomycin. These data suggest that TK1401 had a PDR phenotype. This is thought to be the first report of a patient with PDR (pan-resistant) K. pneumoniae in Japan.

[0080] Genome sequencing of the K. pneumoniae isolate TK1401 revealed a 129 kb plasmid pTK1401 and a 5.5 Mb chromosome, which belonged to the genomic MLST (gMLST) ST11 group. The plasmid incompatibility group was a hybrid incompatibility group, IncR-F33: A-:B-. This compatibility group plasmid is a non-conjugative plasmid (NPL 18). In addition, no junction between K. pneumoniae isolate TK1401 and E. coli J53 was observed.

### (Genome Analysis)

[0081] The complete genome sequence of K. pneumoniae isolate TK1401 is shown in SEQ ID NO 1 and 2. Specifically, chromosomal DNA is shown in SEQ ID NO: 1 in the sequence listing, and plasmid DNA is shown in SEQ ID NO: 2 in the sequence listing.

[0082] The TK1401 chromosome was grouped with the top 100 hits for K. pneumoniae isolates, with a single nucleotide polymorphism (SNP) ranging from 38 to 4,351. It clustered with ST11 isolates identified in Asia (FIG. 1). FIG. 2(a) shows a phylogenetic tree constructed from wgSNP compared the genome sequence of K. pneumoniae ST11 strain TK1401 with that of other K. pneumoniae ST11 strains mainly from China. Genomic capsular typing using wzc and wzi sequences in BIGSdb revealed that K. pneumoniae ST11 isolates mainly clustered with K47-type (wzc47, wzi209), K64-type (wzc64, wzf64), and other capsule synthesis (cps) genes. The TK1401 chromosome was most similar to that of KPC-2-producing K. pneumoniae isolate KP69 (GenBank accession number CP025456) isolated at Huashan Hospital. Shanghai Medical College, Fudan University in Shanghai, China (99% query coverage, 99% identity). Genome analysis of KP69 using CARD revealed that KP69 is not a pan-resistant genotype (Table 2). Tigecycline and polymyxins resistance mutations were identified in the ramR and mgrB genes of TK1401, but not in those of KP69.

TABLE 2

| A [symbol] | TK1401 | | KP69 | | [symbol] | | [symbol] | |
|---|---|---|---|---|---|---|---|---|
| class | C [symbol] | Plasmid | C [symbol] | Plasmid | C [symbol] | Plasmid | C [symbol] | Plasmid |
| β- [symbol] | — | [symbol] | — | [symbol] | — | [symbol] | — | [symbol] |
| | [symbol] | [symbol] | [symbol] | [symbol] | [symbol] | | [symbol] | [symbol] |
| | — | [symbol] | — | [symbol] | — | [symbol] | — | [symbol] |
| C [symbol] | [symbol] | [symbol] | [symbol] | [symbol] | [symbol] | [symbol] | [symbol] | [symbol] |
| Fl [symbol] | [symbol] | — | [symbol] | — | — | — | [symbol] | — |
| | [symbol] | — | [symbol] | — | [symbol] | — | [symbol] | — |
| | [symbol] | — | [symbol] | — | [symbol] | — | [symbol] | — |
| | [symbol] | — | [symbol] | — | [symbol] | — | [symbol] | — |
| A [symbol] | [symbol] | [symbol] | [symbol] | [symbol] | — | [symbol] | — | [symbol] |
| | — | — | — | — | — | AAC [symbol] | — | AP [symbol] |
| | — | — | — | — | — | AP [symbol] | — | [symbol] |
| | — | — | — | — | — | AP [symbol] | — | — |
| | — | — | — | — | — | [symbol] | — | — |
| F [symbol] | [symbol] | [symbol] | [symbol] | — | [symbol] | — | [symbol] | — |
| | [symbol] | — | [symbol] | — | [symbol] | — | [symbol] | |
| T [symbol] | [symbol] | — | — | — | — | — | — | [symbol] |
| ( [symbol] ) | | | | | | | | |
| [symbol] | [symbol] | — | [symbol] | — | — | [symbol] | — | [symbol] |
| Ch [symbol] | [symbol] | [symbol] | [symbol] | [symbol] | [symbol] | — | — | [symbol] |
| Poly [symbol] | [symbol] | — | [symbol] | — | — | — | — | — |
| | [symbol] | — | — | — | — | — | — | — |
| M [symbol] | — | — | — | — | — | — | — | [symbol] |

[symbol]

indicates data missing or illegible when filed

[0083] The genome sequence of K. pneumoniae ST11 strain TK1401 was compared with that of other K. pneumoniae ST11 strains (JM45, HS11286, and KP69) from China (FIG. 1). ST11 isolates JM45 (GenBank accession number CP006656) and HS11286 (GenBank accession number CP003200) were used for comparison in addition to closely related KP69. Overall, the genome structure was conserved. Differences were due to SNPs and insertions and deletions of mobile genetic elements, including the prophage, integrative conjugative element (ICE), transposon (Tn), and insertion sequence.

[0084] HS11286 has two ICEs: ICEKpnHS11286-1 and ICEKpnHS11286-2 [NPL 19]. ICEKpnHS11286-2 was conserved in JM45, HS11286, KP69, and TK1401. By contrast, ICEKpnHS11286-1, which was classified recently as ICEKp3, was conserved in HS11286, KP69, and TK1401 (FIG. 1). These data suggest that TK1401 belongs to ST11 strains have both of these ICEs, which may contribute to the pathogenicity of ST11 strains.

[0085] Comparing the genomes of pan-resistant TK1401 and non-pan-resistant KP69 revealed a deletion in TK1401 (FIG. 3-5). The deleted region, which lies upstream of the ISKpn25 transposase, contains genes encoding DinI, LtrA (a group 11 intron reverse transcriptase), DNA adenine methylase, DNA replication endonuclease, and eight hypothetical proteins and three prophage-related proteins. KP69 and TK1401 have eight and seven ltrA genes, respectively.

[0086] Most of the proteins, including DNA adenine methylase and DNA replication endonuclease, are thought to relate to prophage function. DinI regulates recombination; loss of DinI might upregulate recombination. CYD98_21555, one hypothetical protein, is similar to TraR, which belongs to the DskA_TraR superfamily. TraR is a global transcriptional regulator [NPL 21,22].

[0087] To find the IncR-F33:A-:B-plasmids having 7 resistance genes fosA3, bla_{KPC-2}, bla_{CTX-M-65}, bla_{SHV-}12, bla_{TEM-1}, rmtB, and catA2, NCBI BLASTN 2.10.0 were used by searching nucleotide collection (nr/nt). rmtB, bla_{KPC-2}, bla_{SHV-12}, fosA3, and catA2 sequences used as genetic markers revealed three GenBank data, accession number KP893385, CP034324, LR59607). All three strains having each plasmid belong to ST11. These data suggest that genetic markers (rmtB, bla_{KPC-2}, bla_{SHV-12}, fosA3, and catA2) may be useful to find the multidrug-resistant IncR-F33:A-:B-plasmids, especially having 7 resistance genes fosA3, bla_{KPC-2}, bla_{CTX-M-}65, bla_{SHV-12}, bla_{TEM-1}, rmtB, and catA2, and understand its evolution in K. pneumoniae ST11. fosA3 gene was detected in K. pneumoniae ST11 having wzi209 (K47) and wzi64 (K67) type cps genes (NPL 18), suggesting fosA3 plasmids might evolve in K47 and K67 type K. pneumoniae ST11. pKP1034, pTK1401, and pKSH203-KPC were compared using Easyfig (FIG. 5(b)). This comparison suggested that pKP1034-like plasmids and the rearrangement by recombination might be caused by transposable elements (IS and Tn).

[0088] Plasmid pTK1401 identified from TK1401 genome sequence was phylogenetically analyzed with 41 of the top 97 BLAST hits for K. pneumoniae isolates (FIG. 6). It was most similar to plasmid p69-2 from KPC-2-producing K. pneumoniae isolate KP69 (GenBank accession number CP025458) (99% query coverage, 99% identity). p69-2 was highly similar to the IncR-F33:A-:B-plasmid pKP1034 (GenBank accession number KP893385) having fosA3, bla_{KPC-2}, bla_{CTX-M-65}, bla_{SHV-12}, and rmtB from the epidemic KPC-2-producing K. pneumoniae isolate KP1034.

[0089] Next, we compared closely related phylogenetic group KPC-2-encoding plasmids, pKP1034, p69-2, and pTK1401, using Easyfig (FIG. 2(b)). The comparison suggested that a pKP1034-like plasmid might have undergone rearrangement by recombination to form p69-2; further recombination of p69-2 might have led to the formation of pTK1401.

[0090] The IncR-F33:A-:B-plasmid having fosA3, bla_{KPC-2}, bla_{CTX-M-65}, bla_{SHV-12}, and rmtB formed a cluster with pKP1034, p69-2, pKPGD4, pKPC-CR-HvKP4, and pTK1401. These plasmids were identified from K. pneumoniae ST11 having a K47-type cps gene. pKPC-CR184 HvKP4 was isolated (and sequenced) from a hypervirulent KPC-2-producing K. pneumoniae ST11 strain having virulence plasmid pVir-CR-HvKP4 (NPL 23). In the present example, pTK1401 was identified from pan-resistant K. pneumoniae ST11 having a K47-type cps gene, which lacks virulence plasmids according to genomic analysis using BIGSdb. Further, major virulence genes were conserved in K47 ST11 isolates (Table 3).

TABLE 3

| | Allele number | | | | | |
|---|---|---|---|---|---|---|
| Virulence | K. pneumoniae strain | | | | | |
| gene | hvkp-5 | TVGHCRE225 | TK1401 | KP69 | HS11286 | IM45 |
| FyuA | 11 | 11 | 11 | 11 | 11 | — |
| iroB^{P} | — | 1 | — | — | — | — |
| iroC^{P} | — | U | — | — | — | — |
| iroD^{P} | — | 1 | — | — | — | — |
| iroE^{P} | — | U | — | — | — | — |
| iroN^{P} | — | 1 | — | — | — | — |
| irp1 | — | 65 | 65 | 65 | 19 | — |
| irp2 | 60 | 60 | 60 | 60 | 22 | — |
| iucA^{P} | 1 | 1 | — | — | — | — |
| iucB^{P} | 1 | 1 | — | — | — | — |
| iucC^{P} | 1 | U | — | — | — | — |
| iucD^{P} | 1 | 1 | — | — | — | — |
| iutA^{P} | 1 | 1 | — | — | — | — |
| mrkA | 2 | 2 | 2 | 2 | 2 | 2 |
| mrkB | 2 | 2 | 2 | 2 | 2 | 2 |
| mrkC | 2 | 2 | 2 | 2 | 2 | 2 |
| mrkD | 12 | 12 | 12 | 12 | 12 | 12 |
| mrkF | 8 | 8 | 8 | 8 | 8 | 8 |
| mrkH | 7 | 7 | 7 | 7 | 7 | 7 |
| mrkI | 15 | 15 | 15 | 15 | 15 | 15 |
| mrkJ | 12 | 12 | 12 | 12 | 12 | 12 |
| rmpA2^{P} | 9 | U | — | — | — | — |
| rmpA^{P} | — | U | — | — | — | — |
| ybtA | 1 | 1 | 1 | 1 | 9 | — |
| ybtE | 5 | 5 | 5 | 5 | 11 | — |
| ybtP | 5 | 5 | 5 | 5 | 5 | — |
| ybtQ | 6 | 6 | 6 | 6 | 14 | — |
| ybtS | — | — | — | — | 14 | — |
| ybtT | 5 | 5 | 5 | 5 | 5 | — |
| ybtU | 9 | 9 | 9 | 9 | 10 | — |
| ybtX | 11 | 11 | 11 | 11 | 11 | — |

^{P}plasmid-derived gene:
U, undefined allele.
The allel number of virulence genes was assigned by BIGSdb. Conserved alleles are shown in bold.

[0091] TK1401 could be related to a highly pathogenic carbapenem-resistant Klebsiella pneumoniae identified recently in China and Taiwan (hvpk-5 GenBank accession number NJPJ00000000 and TVGHCRE225 GenBank accession number CP023722); however, it lacks a virulence plasmid (NPL 23,24).

[0092] The resistance genes on the plasmid and chromosome of the TK1401 isolate are listed in Table 1. Mutations in the quinolone-resistant determinant region of the chromosomal gyrA (D87G) and parC (S80I) genes account for resistance to fluoroquinolones (NPL 28). A mutation in the ramR (T1621) transcriptional repressor gene confers resistance to tigecycline (NPL 27). Subsequent overexpression of the AcrAB efflux pump might contribute to resistance to multiple drugs, including chloramphenicol, fluoroquinolones, tetracyclines, and glycylcycline. We found that the colistin resistance of TK1401 is associated with a frameshift mutation in mgrB (FS_aa8).

[0093] The plasmid has carbapenemase gene bla_{KPC-2}, the ESBL gene bla_{CTX-M-65}, and β-lactamase genes bla_{TEM-1} and bla_{SHV-12}, bla_{SHV-11}. Five β-lactamases accounted for resistance to all of the β-lactam antibiotics listed in Table 1. In addition to β-lactamases, we detected chromosomal genes encoding outer membrane porins (ompK35, ompK36, and ompK37), which are associated with membrane permeability and drug resistance.

[0094] TK1401 has a frameshift mutation in ompK35 (FS_aa29), which is different from that in ompK35 (FS_aa134) has by KPC-producing K. pneumoniae ST11 strain HS11286 (NPL 25). The ompK36 gene in TK1401 is identical to an ompK36 variant harbored by KPC-producing K. pneumoniae ST11 strain HS092187 isolated in China (GenBank accession number JX310552), and is associated with carbapenem resistance [NPL 26]. The ompK37 gene of TK1401 is identical to that of HS11286 and NDM-producing K. pneumoniae ST11 isolate JIE2713 (GenBank accession number KC534871) [NPL 26]. All ompK genes in TK1401 are conserved in KP69, suggesting that KP69 is a possible ancestral strain. The present inventors found that the colistin resistance of a pan-resistant K. pneumoniae is associated with a frameshift mutation in mgrB (FS_aa8). Colistin-resistant ST11 strains and KPC-2-producing ST11 strains have been reported in Asia. The emergence of K. pneumoniae ST11 having both phenotypes is a threat to both clinical therapy and infection control.

[0095] As described above, by using the complete genome sequence of the K. pneumoniae isolate TK1401 analyzed by the inventors, the sequence of the complete genome of the bacteria in the sample can be compared with the nucleotide sequence of SEQ ID NO: 1 or 2, and based on the rate of agreement, it can be determined whether the bacteria in the sample are pan-resistant K. pneumoniae or not. In addition, effective antimicrobial agents can be screened by supplying samples containing candidate antimicrobial agents against pan-resistant K. pneumoniae found by the inventors.

[0096] The strains and plasmids used in the phylogenetic tree analysis of K. pneumoniae are shown in Tables 4-7.

TABLE 4
GeneBank accession number, Strain name

CP006659.2 Klebsiella pneumoniae strain ATCC BAA-2146 chromosome 1, complete sequence
CP006918.1 Klebsiella pneumoniae 30684/NJST258_2, complete genome
CP007727.1 Klebsiella pneumoniae subsp. pneumoniae KPN1H10, complete genome
CP008827.1 Klebsiella pneumoniae subsp. pneumoniae KPN1H1, complete genome
CP008831.1 Klebsiella pneumoniae subsp. pneumoniae KPR0928, complete sequence
CP009771.1 Klebsiella pneumoniae subsp. pneumoniae strain KPN1H33, complete genome
CP009775.1 Klebsiella pneumoniae subsp. pneumoniae strain KPN1H32, complete genome
CP010361.1 Klebsiella pneumoniae strain 32192, complete genome
CP010392.1 Klebsiella pneumoniae strain 34618, complete genome
CP011647.1 Klebsiella pneumoniae strain CAV1596, complete genome
CP011976.1 Klebsiella pneumoniae DMC1097, complete genome
CP011980.1 Klebsiella pneumoniae 500_1420, complete genome
CP011985.1 Klebsiella pneumoniae UHKPC07, complete genome
CP011989.1 Klebsiella pneumoniae UHKPC33, complete genome
CP014294.1 Klebsiella pneumoniae strain KP38731, complete genome
CP014647.1 Klebsiella pneumoniae strain KPN1H36,complete genome
CP015392.1 Klebsiella pneumoniae strain CR14, complete genome
CP015822.1 Klebsiella pneumoniae isolate blood sample 2 chromosome, complete genome
CP018352.1 Klebsiella pneumoniae strain CAV1417 chromosome, complete genome
CP018356.1 Klebsiella pneumoniae strain CAV1453 chromosome, complete genome
CP018427.1 Klebsiella pneumoniae strain MNCRE69 chromosome, complete genome
CP018428.1 Klebsiella pneumoniae strain MNCRE78 chromosome, complete genome
CP018437.1 Klebsiella pneumoniae strain MNCRE53 chromosome, complete genome
CP018438.1 Klebsiella pneumoniae strain Kp_Goe_822917, complete sequence
CP018454.1 Klebsiella pneumoniae strain SWU01 chromosome, complete genome
CP018692.1 Klebsiella pneumoniae strain Kp_Goe_821588, complete sequence
CP018816.1 Klebsiella pneumoniae strain AP_0049, complete genome
CP018883.1 Klebsiella pneumoniae subsp. pneumoniae strain BR7 chromosome, complete genome
CP018885.1 Klebsiella pneumoniae subsp. pneumoniae strain BR21 chromosome, complete genome
CP019772.1 Klebsiella pneumoniae subsp. pneumoniae KPN_KPC_HUG_07 genome
CP020071.1 Klebsiella pneumoniae strain AR_0115, complete genome
CP020837.1 Klebsiella pneumoniae strain BK13043 chromosome, complete genome
CP020901.1 Klebsiella pneumoniae strain K66-45 chromosome, complete genome
CP021549.1 Klebsiella pneumoniae strain AR_0112, complete genome
CP021685.1 Klebsiella pneumoniae strain AR_0146, complete genome
CP021718.1 Klebsiella pneumoniae strain AR_0129, complete genome
CP021751.1 Klebsiella pneumoniae strain AR_0113 chromosome, complete genome
CP021833.1 Klebsiella pneumoniae strain AR_0120, complete genome
CP021859.1 Klebsiella pneumoniae strain AR_0125 chromosome, complete genome
CP021950.1 Klebsiella pneumoniae strain AR_0148 chromosome, complete genome
CP022143.1 Klebsiella pneumoniae 704SK6 genome
CP022573.1 Klebsiella pneumoniae strain BIC-1 chromosome, complete genome
CP022691.1 Klebsiella pneumoniae subsp. pneumoniae AUSMDU00008079 chromosome, complete genome
CP022882.1 Klebsiella pneumoniae strain 911021 chromosome, complete genome
CP022997.1 Klebsiella pneumoniae strain 721005 chromosome, complete genome
CP023722.1 Klebsiella pneumoniae strain TYGHCRE225 chromosome, complete genome
CP023907.1 Klebsiella pneumoniae strain FDAARGOS_436 chromosome, complete genome
CP023933.1 Klebsiella pneumoniae strain FDAARGOS_443 chromosome, complete genome
CP023941.1 Klebsiella pneumoniae strain FDAARGOS_444 chromosome, complete genome
CP025005.1 Klebsiella pneumoniae strain AUSMDU00003562 chromosome, complete genome
CP025008.1 Klebsiella pneumoniae strain AUSMDU00008119 chromosome, complete genome

TABLE 5
CP025037.1 Klebsiella pneumoniae strain NU-CRE047 chromosome, complete genome
CP025456.1 Klebsiella pneumoniae strain KP69 chromosome, complete genome
CP025951.1 Klebsiella pneumoniae subsp. pneumoniae strain GD4 chromosome, complete genome
CP026130.1 Klebsiella pneumoniae strain F1 chromosome, complete genome
CP026132.1 Klebsiella pneumoniae strain F5 chromosome, complete genome
CP026140.1 Klebsiella pneumoniae strain F127 chromosome, complete genome
CP026145.1 Klebsiella pneumoniae strain F132 chromosome, complete genome
CP026149.1 Klebsiella pneumoniae strain F138 chromosome, complete genome
CP026155.1 Klebsiella pneumoniae strain B12(AN) chromosome, complete genome
CP026585.3 Klebsiella pneumoniae strain WCHKP649 chromosome, complete genome
CP027036.1 Klebsiella pneumoniae strain 16_GR_13 chromosome, complete genome
CP027053.1 Klebsiella pneumoniae strain 2_GR_12 chromosome, complete genome
CP027068.3 Klebsiella pneumoniae strain WCHKP8F4 chromosome, complete genome
CP027146.1 Klebsiella pneumoniae strain AR_0363 chromosome, complete genome
CP027160.1 Klebsiella pneumoniae strain AR_0361 chromosome, complete genome
CP027697.1 Klebsiella pneumoniae strain KP30835 chromosome, complete genome
CP028180.1 Klebsiella pneumoniae strain CFSAN054110 chromosome, complete genome
CP028542.3 Klebsiella pneumoniae strain WCHKP2 chromosome, complete genome
CP028783.2 Klebsiella pneumoniae subsp. pneumoniae strain SCKP020046 chromosome, complete genome
CP028793.2 Klebsiella pneumoniae strain WCHKP020030 chromosome, complete genome
CP028797.2 Klebsiella pneumoniae strain WCHKP040035 chromosome, complete genome
CP028806.2 Klebsiella pneumoniae strain WCHKP7E2 chromosome, complete genome
CP028994.1 Klebsiella pneumoniae strain AR_0079 chromosome, complete genome
CP029099.1 Klebsiella pneumoniae strain AR438 chromosome, complete genome
CP029216.1 Klebsiella pneumoniae strain L201 chromosome
CP029220.1 Klebsiella pneumoniae strain L388 chromosome
CP029226.1 Klebsiella pneumoniae strain L491 chromosome
CP029384.2 Klebsiella pneumoniae subsp. pneumoniae strain SCKP020079 chromosome, complete genome
CP029689.1 Klebsiella pneumoniae strain 160111 chromosome, complete genome
CP030341.1 Klebsiella pneumoniae strain AR_362 chromosome, complete genome
CP031721.1 Klebsiella pneumoniae strain WCHKP3 chromosome, complete genome
CP032163.1 Klebsiella pneumoniae strain XJ-K1 chromosome, complete genome
CP032207.1 Klebsiella pneumoniae strain AR_0109 chromosome, complete genome
CP033242.1 Klebsiella pneumoniae strain 675920 chromosome 675920
CP033954.1 Klebsiella pneumoniae strain L39_2 chromosome, complete genome
CP033960.1 Klebsiella pneumoniae strain L482 chromosome, complete genome
CP034249.1 Klebsiella pneumoniae strain KP18-29 chromosome, complete genome
CP034327.1 Klebsiella pneumoniae isolate KSH203 chromosome, complete genome
CP034760.1 Klebsiella pneumoniae strain NB5306 chromosome, complete genome
CP035540.1 Klebsiella pneumoniae subsp. pneumoniae strain CCRI-22199 chromosome, complete genome
CP036300.1 Klebsiella pneumoniae subsp. pneumoniae strain WCHKP015093 chromosome, complete genome
CP036305.1 Klebsiella pneumoniae strain WCHKP020098 chromosome, complete genome
CP036371.1 Klebsiella pneumoniae strain WCHKP020037 chromosome, complete genome
CP038002.1 Klebsiella pneumoniae strain SCKP020009 chromosome, complete genome
CP040539.1 Klebsiella pneumoniae strain CR-HvKP4 chromosome, complete genome
CP040545.1 Klebsiella pneumoniae strain CR-HvKP5 chromosome, complete genome
CP043047.1 Klebsiella pneumoniae strain KLP268 chromosome, complete genome
LR130548.1 Klebsiella pneumoniae strain KPC2 genome assembly, chromosome: 1
LT216436.1 Klebsiella pneumoniae isolate 207M1D0-se-2013-04-03T11:32:06Z-1606409 genome assembly, chromosome: 1
comig1 Klebsiella pneumoniae strain TK1401 chromosome, complete genome

TABLE 6
GenBank accession number, Plasmid name

AP018136.1 Escherichia coli plasmid pM105_FII DNA, complete genome, isolate: M105
AP018138.1 Escherichia coli plasmid pM107_FII DNA, complete genome, isolate: M107
AP018144.1 Escherichia coli plasmid pM214_FII DNA, complete genome, isolate: M214
AP018572.1 Escherichia coli MH13-051M plasmid pMH13-051M_1 DNA, complete genome
CP016403.1 Klebsiella pneumoniae subsp. pneumoniae stain F5 plasmid pF5, complete sequence
CP017086.1 Proteus untabills strain T18 plasmid pT18, complete sequence
CP017287.1 Klebsiella variicola stain G [symbol] 3 plasmid pKPG [symbol] -3c, complete sequence
CP017852.1 Klebsiella variicola stain G [symbol] 2 plasmid pKPG [symbol] -2c, complete sequence
CP018455.1 Klebsiella pneumoniae strain [symbol] plasmid unnamed, complete sequence
CP021195.1 Escherichia coli stain H17 plasmid pH17-2, complete sequence
CP021210.1 Escherichia coli stain strain Z247 plasmid p2474-NDM [symbol] , complete sequence
CP023895.1 Escherichia coli stain FDAARGOS_433 plasmid unnamed2, complete sequence
CP023934.1 Klebsiella pneumoniae strain FDAARGOS_443 plasmid unnamed3, complete sequence
CP023942.1 Klebsiella pneumoniae strain FDAARGOS_444 plasmid unnamed2
CP024430.1 Klebsiella pneumoniae strain DA48896 plasmid p48896_1, complete sequence
CP024836.1 Klebsiella pneumoniae strain CRKP-2297 plasmid pCRKP-2297_2, complete sequence
CP024840.1 Klebsiella pneumoniae strain CRKP-1215 plasmid pCRKP-1215_2, complete sequence
CP025458.1 Klebsiella pneumoniae strain KP69 plasmid p69-2, complete sequence
CP025463.1 Klebsiella pneumoniae strain F44 plasmid p44-2, complete sequence
CP025468.1 Klebsiella pneumoniae strain [symbol] 187 plasmid p187-2, complete sequence
CP025952.1 Klebsiella pneumoniae subsp. pneumoniae strain GD4 plasmid pKPGD4, complete sequence
CP026131.1 Klebsiella pneumoniae strain F1 plasmid pF1_1, complete sequence
CP026166.1 Klebsiella pneumoniae strain F5 plasmid pF5_1, complete sequence
CP026141.1 Klebsiella pneumoniae strain F127 plasmid pF127_1, complete sequence
CP026147.1 Klebsiella pneumoniae strain F132 plasmid pF132_2, complete sequence
CP026152.1 Klebsiella pneumoniae strain F138 plasmid pF138_3, complete sequence
CP026584.1 Klebsiella pneumoniae strain WCHKP649 plasmid pKPC2_095649, complete sequence
CP026589.1 Klebsiella pneumoniae strain NUHL6047 plasmid p3, complete sequence
CP027067.1 Klebsiella pneumoniae strain WCHKP8F4 plasmid pKPC2_095084, complete sequence
CP028541.2 Klebsiella pneumoniae strain WCHKP2 plasmid pKPC2_020002, complete sequence
CP028582.2 Klebsiella pneumoniae strain WCHKP36 plasmid pKPC2_020036, complete sequence
CP028790.2 Klebsiella pneumoniae strain WCHKP020030 plasmid pKPC2_020030, complete sequence
CP028796.1 Klebsiella pneumoniae strain WCHKP040035 plasmid pKPC2_040035, complete sequence
CP028805.1 Klebsiella pneumoniae strain WCHKP7E2 plasmid pKPC2_085072, complete sequence
CP029219.1 Klebsiella pneumoniae strain L201 plasmid pKPC-L201
CP029225.1 Klebsiella pneumoniae strain L388 plasmid pKPC-L388
CP029230.1 Klebsiella pneumoniae strain L491 plasmid pKPC-L491
CP029381.1 Klebsiella pneumoniae subsp. pneumoniae strain SCKP020039 plasmid pKPC2_020079, complete sequence
CP030154.1 Klebsiella pneumoniae strain 160111 plasmid pKPC2_L111, complete sequence
CP031720.1 Klebsiella pneumoniae strain WCHKP3 plasmid pKPC2_02003, complete sequence
CP032166.1 Klebsiella pneumoniae strain XJ-K1 plasmid unnamed3, complete sequence
CP033395.1 Klebsiella pneumoniae strain WCHKP015623 plasmid pKPC12_015625, complete sequence
CP033404.1 Klebsiella pneumoniae strain WCHKP115069 plasmid pKPC2_115069, complete sequence
CP033956.1 Klebsiella pneumoniae strain L39_2 plasmid p3_L39, complete sequence
CP033962.1 Klebsiella pneumoniae strain L482 plasmid p3_L382, complete sequence
CP034125.1 Klebsiella pneumoniae strain BJCK909 plasmid p2b2, complete sequence
CP034324.1 Klebsiella pneumoniae isolate KSH203 plasmid pKSH203-KPC, complete sequence
CP034736.1 Escherichia coli strain L53 plasmid pL53-3
CP034846.1 Escherichia coli L103-2 plasmid p103-2-4
CP036301.1 Klebsiella pneumoniae subsp. pneumoniae strain WCHKP015093 plasmid pKPC2_015093, complete sequence
CP026306.1 Klebsiella pneumoniae strain WCHKP020098 plasmid pKPC2_020098, complete sequence
CP036362.1 Klebsiella pneumoniae strain WCHKP2080 plasmid pKPC2_095080, complete sequence
CP036367.1 Klebsiella pneumoniae strain WCHKP115068 plasmid pKPC12_115068, complete sequence
CP036372.1 Klebsiella pneumoniae strain WCHKP020037 plasmid pKPC2_020037, complete sequence
CP038003.1 Klebsiella pneumoniae strain SCKP020009 plasmid pKPC2_020009, complete sequence [symbol]
indicates data missing or illegible when filed

TABLE 7
CP040080.1 Klebsiella pneumoniae strain LSH-KPN25 plasmid pLSH-KPN25-1, complete sequence
CP040535.1 Klebsiella pneumoniae strain CR-HvKP1 plasmid pCR-HvKP1-KPC, complete sequence
CP040541.1 Klebsiella pneumoniae strain CR-HvKP4 plasmid pCR-HvKP4-pKPC, complete sequence
CP040547.1 Klebsiella pneumoniae strain CR-HvKP5 plasmid pCR-HvKP4-KPC, complete sequence
CP040907.1 Escherichia fergusonii strain EFCF056 plasmid pEF03, complete sequence
CP042601.1 Escherichia coli strain NCYU-29-69 plasmid pNCYU-29-69-2, complete sequence
FJ628167.2 Klebsiella pneumoniae strain KP048 plasmid pKP048, complete sequence
FP927996.1 Escherichia coli plasmid pXZ, complete sequence
JN232517.1 Escherichia coli strain 7A8 plasmid pHN7A8, complete sequence
JQ432559.1 Escherichia coli plasmid pHN7A8, complete sequence
JX997935.2 Escherichia coli strain 3A11 plasmid pHN3A11, complete sequence
KP893385.1 Klebsiella pneumoniae subsp. pneumoniae strain KP1034 plasmid complete sequence
KR078259.1 Escherichia coli strain YD472 plasmid pYHCC, complete sequence
KT185451.1 Klebsiella pneumoniae plasmid pCT-KPC stain LJ04, complete sequence
KT725788.1 Klebsiella pneumoniae strain ST147 plasmid pCC1410-1, complete sequence
KT725789.1 Klebsiella pneumoniae strain ST147 plasmid pCC1409-1, complete sequence
KX503323.1 Escherichia coli strain HNEC46 plasmid PHNEC46, complete sequence
KY130431.1 Klebsiella pneumoniae plasmid pABC143C-NDM, complete sequence
LN897474.2 Klebsiella pneumoniae p397Kp plasmid, complete sequence
LN897875.2 Klebsiella pneumoniae p477Kp plasmid, complete sequence
LR697130.1 Escherichia coli isolate 83954879-d38b-11r9-8995-68b599768938 genome assembly, plasmid: p14ARS_NMC0074-3
LS992188.1 Escherichia coli isolate Escherichia coli str. 3426 genome assembly, plasmid: 4
LT965717.1 Klebsiella pneumoniae genome assembly, plasmid: 31
LT968753.1 Klebsiella pneumoniae genome assembly, plasmid: 67
MF133493.1 Klebsiella pneumoniae strain 675920 plasmid p675920-1, complete sequence
MF156695.1 Klebsiella pneumoniae strain 1642 plasmid p1642-1, complete sequence
MF168402.1 Klebsiella pneumoniae strain 1068 plasmid p1068-KPC, complete sequence
MF168403.1 Klebsiella pneumoniae strain 12139 plasmid p12139-KPC, complete sequence
MF168404.1 Klebsiella pneumoniae strain 20049 plasmid p20049-KPC, complete sequence
MF168405.1 Klebsiella pneumoniae strain 64917 plasmid p64917-KPC, complete sequence
MF168406.1 Klebsiella pneumoniae strain 283747 plasmid p283747-KPC, complete sequence
MF437312.1 Klebsiella pneumoniae strain CR-HvKP4 plasmid pKPC-CR-HvKP4, complete sequence
MF918372.1 Klebsiella pneumoniae plasmid p1512-KPC, complete sequence
MG591701.1 Escherichia coli strain EC36 plasmid pEC36-2, complete sequence
MG764548.1 Escherichia coli strain 11011 plasmid p11011-fosA, complete sequence
MH255829.1 Klebsiella pneumoniae subsp. pneumoniae strain 8H9 plasmid p8H9-CTX-TEM, complete sequence
MH263653.1 Klebsiella pneumoniae strain QL24 plasmid pKPC-QL24, complete sequence
MK036886.1 Klebsiella pneumoniae strain 283149 plasmid p283149-KPC, complete sequence
MK036887.1 Klebsiella pneumoniae strain 397108 plasmid p397108-KPC, complete sequence
MK036888.1 Klebsiella pneumoniae strain 911021 plasmid p911021-KPC, complete sequence
MK396843.1 Klebsiella pneumoniae strain LSH-KPN148 plasmid pLSH-KPN148-1, complete sequence
MK433206.1 Klebsiella pneumoniae subsp. pneumoniae K15 plasmid pK15-FOS, complete sequence
conria2 Klebsiella pneumoniae strain TK1401 plasmid pTK1401, complete sequence

### SEQUENCE LISTING

1. A detection method for pan-resistant K. pneumoniae comprising of:
performing complete genome analysis of the bacteria contained in the sample; and
comparing a nucleotide sequence contained in the obtained complete genome with nucleotide sequences of SEQ ID NO: 1 or 2, and determining whether or not the bacteria in the sample is pan-resistant K. pneumoniae based on the rate of agreement.

2. A screening method for antimicrobial agents comprising of:
supplying a sample containing a candidate antimicrobial agent to pan-resistant K. pneumoniae which has chromosomal DNA comprising of the nucleotide sequence of SEQ ID NO: 1 and plasmid DNA comprising of the nucleotide sequence of SEQ ID NO: 2.

3. A recording media and database characterized by the storage of nucleotide sequence information of SEQ ID NO: 1 or 2.

The application's sequence listing, which the Patent Office published only in electronic form, follows.

SEQUENCE LISTING (2 sequences)

SEQ ID NO: 1 - DNA, 5488304 bp, Klebsiella pneumoniae (residues 1-1,829,435 of 5,488,304)
  misc_feature: Chromosome DNA
attgccgatggcgtaggtccggcgaccaaagttggttttatgcagcaggaaggtgaaggcggccgcgaggaggataaacagcgcaaactcaaaagagagcgccccccacacgtacccctggccgaaccaggcaaagctctccggatagtggttgagtgcctgatcgcccaacaggatataggtgatgccgcgatacaggctcatggtgccgatggtgatcacaatggacgacaggttaaagcgggtcaccagcaagccgttgaacaggccgcacagcagacctacgcccaggccgatgaccaccagcagcggagtgtccatccccgctgccgcgcagaagcccatcaccgttgagctgagagccatcgtcgaggctaccgacagatcgatttcccgggcgataatcagcatcgccatcggcaggacgacgatcgccttctcggtaaaggtaaaggtggcgtccgacaggttccagatattgaggaagtacggggaagccacggcgttgccgataaataccgccagggtgaccgccagtaaaaacccttcccagcacagcaggcggcgcagcggcgacggcgcggccggggcgtttttcatctcttcagataccatcattttgctcatgatttcaccgcctgtttctgtctggctaacgccgcgttgcgcaggattaaccgcccgtgaccgcgattgccgcgctcgttgagcagcaccgccatgacgatcaccgccccggaaatcgccatttgccagaagggcgagatgccgatcaccggcagggcgttattgatgaccccgaggaacagcgcgccgcacaggcagcccagcacccgtccgcttccgcccatggtgctgataccgccgatcacgcaggcagcgaccacctggagttcaaaaccgttggcgacgtcgacataggcgacggcgaagcgcgagatccacagatagccgcagaagccggccagcgcgccggagagacagaagctgacgaactgcatttttccggcgttaatgccggtgtagtatgccgccgtcgcgttgccgcccgcggtgtataaggcccggccggtgcggctgtagcgcaggaaataacccaccagcagcagcgcggcgatggcgcaccagctcagtagcggcagccccaggagggggctgcgcggcagactgagaaaatcagcgctcatctgatgtgagttaacccagccgccgtcagtcagcaggaagataatgccgcgataaatgctcatggtgcccagggtcaccacaatggcgggaatgccgaggcgccagaccagcaggccgttaattactcccatcagcaggcccagcagagtcgccagcgccagcagcgctaccaccggaatacccggatagtgggcgttaagcagggcgacgatcatcccggtcagcgccaggttggcggccatcgacagatcaatgcctttggtgagcaacaccatcatctggccgagggcgaggatgataaggatggcggtatcgttaaacatctccaccagattgcccggtgaaacgaacgacggcgcccggctgccgatggcgccgatcatcaaaataatgaccaccgccagcagcgcttcgcgatgtttcagccatgcgtgtcccatcatgccgcctcctggccgatgccgctagcggcgctaacgatggtttccgccgtcgcttccccggcccggtactcggcgaccatctgcccttcgtgcattacgataatccggtcggccatgcccatcacttccggcagctctgacgacaccataatcaccgccagcccctggctgaccagctcggacataaactgatgcacggcggcctttgagccgatatcgatgcctttggtcggctcatcgagaatgatcacttcgggctgggtcgccagccatttgccaatcaccactttctgctggttgccgccggagagggtctccaccggctgccgccagctgaaggcttttacctgcaggcgcgaggcgtactcgtcggccagccgccattcccgggcgtcgttcaggacgccgttagggttgagcttgctgagctgcggtaaactgatgttctgggcgataggcagggcgatgatcgctccctgtttctgccgctcttccggcacgcagacgatgcccgcgcggatggcgtcggcgggctggtgaaagcgcatggttctgccgttcaggcggatctcgccggaggaggggcgcgagacaccggagagcgcctgcatcagctcggtgcgtccggcgcccaccaggccgtaaaagccgagaatttctcccttgcgcaggcggaagctgatatgggcaaactcggtaggatgacagagatcggtcacctccagcaccgtttctccgggtgtgcagtcgactttcgggtaggtttggctgatcgcccggcccaccatcatcgacaccatccgctcttcggtgatgtcgcttatcgccccggagctgacgtacaccccatcgcgcaggatggtgtaataatcggccagctcgaagatttcatcgaacttatgcgagataaacaggatcgctttgccgtcctgcttcagacgctcaacgatgtgataaaactcgaggatttcatgctgggaaagcgcggcggtcggctcatcgaggatcaccacctgggcgtcgaaagccagcgcccgggcaatcgccaccatgtgacgctgggcgatgctgagggttttcagcgtggctcgcgggtcgatctggacttccagccgggtgaggatctcgttggctctgcggtgcatcgccggccagtcgagcgttttcagcagtcccttatacagatactggccgacgaaaatgttttcgctgaccgagagttcgtcaaacagcacggtttcctggtgaatggcggtgatccctaccttatgcgccgactccggcgttggcagatgaatggggatcgctttatagaggatctcgccctcttcgggctgataaataccggtcatcactttgaccagcgtggatttccccgcgccgttttcgccgattaaggcggtcactttgccgggccagagatcaagctgcacgttctcaagggcgcgcacaccgggaaaaattttggtgatccccttcagcgacagcagtggcgttgatgctgacatgatagttctccacaaaaatcacccctcaccctaaccctcccccacaggggcgagggaacggtccggcgtccgctggccgcatcgcgcagagggccagccgttccccctctccctccgggagagggccggggtgagggaacaaggattagaaaattttcgagaacttatcgatgttgctcgcatcgtagacaaacggcttggccatcgcgccattcccctcggcgtccagcttcactttgcccagcttgcccatactggcttcggttttggtcgccgtgcctttgactaaatcgtcggccagataggtggcggcgtagcccaggtcaatcgggttccagatggcgaagcttttgctggcgccggacttgatcgcgccggccatttccgacggcagccccagcccggtgacatacactttgccgattttgccctggtccttcaccgcctgcgcggcggcaacaatccccaccgacgacggcgagacaatgactttcaggtccggatatgatttcagcagacccaccgcttcgcggtagcttttatccgacagatcgtcaccgtaggcgacggtgaccagctgcaccgacggatactgcggtagcacctttttcatctcctcaatccagatgttctggttcgtggaggttggggtggcgcttaacacggccacctcgcctttctcaacgttcagcgcctgcagcgcatcggcggcaagcttgacgttggtttcgccaattaaggcgttatttgaggggttaagatggatctgacggcctgccggcgccacgccggagtcccatgagaccaccttgatgccgcgctgcatcgcttttttcagcaccggcaccaccgcgtccggatcgttggcggaaatggcgatcgcatccaccccctgggcgatcaacccgttcagcacgtcgatctgcgcctcggcggtggtagtggtcgggccggtgtagatcactttgacatcacctaactccttggctgcctgttgggcgccaacgttggcggcttcgaagaagccatttcccagcgatttcgccacaagggcgattttaacttcggctaaggcggaaccggacaacgccagggcggcaacggtgaggatcaagcttgtctttgttttcattgcttttactccacatgagttagttttgtagggtttgcaggtgatatttcgccccgtctcggtgagcggggcgcgatgttgttatggataaagatctaaagcggactgcagcggctgcacgttgaagcgtttgccaagggcgataagctcgtcgcgggtgatggtctgcttcatcccgcccatcgacaagactttcaccagcacttcggcggacttctcggcggtatcgatcaggccgaaggtctcatccagcgtggggccgctgccgaagacgccgtggaacggccacagcacaagcgagtgtttttgcatggtttcggcggtcgcctggccgatttcatcggtgcccggcaccatccacggcagaatgccgacgccatccgggaagaccaccagacattcggtgctaccttcccacagcttacgggtgaaaagatcgctgtggttctccagaacataggtcagggcgatcaggttggtggcatggcagtgcatgatcacccggtctttgccgccggtcagtttgatgcgctcgctgtgcgacaggaagtgtgccggcagctcggaggtcgggacggcatcctccgtcaggccccacaggatatggtatcccgcgccgtcgctgtcgaccttcaccacgccgaggttagcggccgggtcgagctggacgttacggaagaatttgccggagccggtgacgataaacggctggttggccagggttggcatcggctggctgagggcgatatagcgcggtttggcgtggaaatccgccgcgtaaggttcgatatccgcttcatccagacgcagcgtcaggttgccgccgttgcgttcgtcccagcctttcagccaggcgtcggaggtggctttgatcatgccctggacgaaccaggcgtcgataatggtctgcatagtcttgtctttcctgttgattcggtgcggggttgaccccctcaccctaaatatgtgcgtgcccccggattgcgccgtaaacggcttatccgggctaccggttcgtagcccgggtaaggcgtcagccgcgacccggggaagctcgtgcattacccgcgctggctcagaaccgcattctcataagcccgtacgctgtccagccactggctgcccgccggcgtgtcgtgacgctgacagtacatctcccagatggcctgccacggcagcgatttttgctcttcgagcagcgccaggcgggcggtgtaatcgccgtcgttctccagctggcgcagctgggcggtcggttccagcagggcgcgcagcagcgcttttttcatattgcgggtgccaatcacccaggccgcgatgcggttgatggaggcatcgaagaagtcgaggccgatgtgcacgcggtcaaacaggttatggcgaatgatttcgctggcgatggcctgggtttcatcatccagcagcaccacgtggtcgctgtcccagcgcaccgggcggctgacgtgcagcagcaggcgcgggatgtagagcatggcggcggagatcttgtcggagatcacttccgtcggatggaagtggccggcatcgaggcacagcgccgtctgacggctggtggcgtaacccatatagaactcgttggagccgacggtgtagctttcggcgccgatgccgaacagcttgctctccacggcgtcgatatggtgcgccgggtcgagcttctcgctgatcacctcatcaagggcgttcagcagccgctggcgcggggcgaagcggtcaacggttatatccttcatgccgtccggcacccagatattcatcaccgacggcgtgcccagctgttcgccaaaataagcggatacgcggcggctggctttgcagtggtcgatccagaactggcggatctcatcgttggcgtgcgacagggtaaagccgtcggcgctcagcggatgcgagaagcaggaggggttgaaatccagccccagtttgttggctttcgcccacgtaacccagtttttaaagtgctccggcttaatctcattgcgcgctaccggcgcgtcggattccaggtaaatagcgtgcagattgagacgctttggccccgggatcaggctcagcgcctgctcaaggtcagcgcggagttcttctgcattgcgcgctttgcccgggtagttgccggtcgcctggatgccgcctgtcaggcttcccgccgggttttcgaaaccggcgacgtcgtcaccctgccagcagtgcatggagacgggcagacggtccagctggcgcagggcctcctcgacatccacgccgacggcggcgtagcgctgcttagcaatttcccaggcttgttcaagttgagtggtcatgcgcaaagctccttggtctgttgtggctgaaactgcgccacgaaacgggcaatttcactatcaggattgggggtaaaagtggtgagcgccgcgttgccgcgcactacctgacgaaactcatcgacattggccagctcgtcgagggtcattaactggatgccgatattgccgagggtggaggcctctatcgggccggccacgacggcgatcccgcaggcgtcagcgcacagctggttgagcagcgtgttctgacagccgccgccgacgatatgcagctggctgaaggggtggccgcgcagcgccgccagctcgttaagcacccgggcgtagagcagcgccaggctgtcgaaaatgcagcgcgccagttcggcatcgctttcaggaaccggctgcccggcgtcgcgacaggcggcctggatctcggcgctcatactggccgggttgataaagcggtcatcgttgcagtcaattatgaagcggcacgccggtagcgcggcggtgcgggcgatcagcccctgcaggtcgctgacgttttgctcttttagcacccgctgcagcagccacaggcccatgatatttttcagcacccgatagcggccttcggctccgccttcgttggtgatattggcctgcagcgccgcgtcgcaggtgtacggcgtcaggctttcaaaccccatcagcgaccaggtgccggaggagagataggcggcatggcggtcggccagcggggaggcgatcaccgcgctggcggtgtcgtggctggcgacagcgactaccggaattcggttaccctgcgggcagatccagtggcctatcacattgccggggtgggtcggctttccgaaccacgccaacggcgcgccggtccagttcagcagcgtctcatcccagctatcgctgttaatattgaccagctgggtggtggtggcgttggtatattcccagttcagattgccggtcaggcggaagctgaaatagtcggggatcagcagggcatgggcagcctgactgaccagctccggctgctgctccaccagcgcgcgcagctgataaagcgtgttaaacggcaaaaactgaatgccgctgcggcgatagatttccgcccggcccagctgcgcttcagcgtgacgcagcaggccctgggtgcggtcgtcacgataggagatcggcagcccgacgcgctggccctgcttatccagcaggacataatctaccccccaggtatcgatgccgatactgtctatcagaatgccctgctcacacactttctccagcccgcggcggatctcgccttccaggctatctacatcccagcagtcgaagccgtctactttctgcagactattggtgaagcgatgaatttcgcgcagcgtcagggcgcgcggcccgggctgatagctggcgagcatcacccgcccgctggaggcgcctaaatcgacagcgacacaatgacgaatactcatgaaacgatccttcttaaaatcattgtccgcagtctaaaaaaggccgtttactgacaccttctcgctacggacagccaaaactggccgctggcaagaaagcaaaggtgaccgtgagggacatcacagtttgcggttttaggggatggcgagggggatgtgatggcctccgcagttccgcatctttccggctgattcttgaaaaagcggcaggatttacgaatttcgcggtcaaaaattgaaggccggatagccaacccttcattactatcagccggtgactgataatttttctcattacgagggtggcatcatgaccatattgcacagtacggatttctttaaggccgggatctcgacggtggctattgaaccccgcctccctcagtcggcctttccggaacatcaccatgatttccatgaaatagttatcgtggagcagggatcgggtattcacgtcttcaatggccagccctacaccattggcggcggttcggtctgttttatccgcgatcacgaccgccatctttacgagcacacggataatctgtgtctgaccaatgtgctctatcgcgcgccggatgcgtttcgctttctcgccggggtcagtcaactactgccccaggaacaggaaggaaactacccctcgcactggcgggtgaatcaaaccgtcctgcaacaggtgcggcatatcgtggcgcagatcgaggccgtggggagcgatacggatactcatgccgtcgccagccgtgagatcctgtttatgcagctgctggtgctgttacgtaaaagcagccttgcggaagaggccaccaacaacgatgcgcggctgaatcagctgttggcctggctcgaagaccattttgcgcaggagatctgctgggaggaggtggcggcgcagttttcgctgtcgctgcgtacgctgcaccgccagctgaagcagcagaccggtctgacgccacagcgctatcttaatcgggtgcgcctgatgaaagcccgccacctgctgcgccacagcgatgaaagcgtgactgatatcgcttatcgctgcggcttcggcgacagtaaccacttttcgacgctttttcgccgggagttcgactggtcgccgcgcgatatccgccaggggcgcgacgccattcttcagtaacgcgagaagagtcaacgtattgcagactaaaaacgcgaataatgcgccgttatccgcgtttggagtgtgagccgtggccggtctgattttacgtaaagaggagtttttcccttccgccacacaggcagtggcggtggcagaccgctacccgcaaaatgtctttgccgaacatacccatgagttctgcgagctggtgctggtgtggcgaggcaacgggctgcacgtccttaacgatcgtccctggcgcattacccgcggcgatctgttctacattcgcgccgaagataaacactcctatgcttccgttaacgatctggttctgcagaacatcatctattgcccggagcggctgcagctcaattttgactgggccggggcgatccctggcctcttcggtacgccgtggaagccccactggcgcatgggcagcacaggtatggcgcaggcgcgccaggtgattagccagcttgagcatgagtgcgcccggcgcgacgcgcagggaaatgcgatggccgaactgctttttgcccagctggcgctgacgttgcagcgccatcgctacgcgacggatgatcccgcggcgacgcagcgcgaagcgctgctggacaaactgctggccgcgctggcggccagcctcagccgcccctttgttctggagcgtttctgcgagcaggagggcggcagcgagcgggcgcttcgccagcagtttcgccagcaaaccgggatgaccatcaatcactatttacgccagctgcggatctgccatgcgcagtatctgctgcagcataccgagcgcttaatcggcgatatcgccatgcagtgcggctttgaggacagtaactacttttcggtggtttttagccgggaaatcggcatgtcgccggggcagtggcggcagcgcagtcgcgccgccgcctgaagagcgtcgttgtcaggcagatgatccggtgattaactggccattcccagaccgacgatattggcggcgatgataatcaccacgcagccgaggctcaggacgctcaccggacgacggccggcgttgttccactccttcagcaccagacccaccacaccgccgcacagcacgtagaaactcatgtgcagcatccagctcatataatcatactgcgccggaatgctggcgtggccccaggcatagaagaagaactggagataccacatcagaccgccgagggcggagagcagaaggttgctgatgataagcggtttggccagcgagaaatcggctttgactgacaggttcttcactttcgccagacgaataaagcagaagccaaggttaaccagcgccccgccgcccataatcaccacgtagcttggcagcgctgcgtacagcgggtcgacgccgagcgccgcggcggcatcatgcatcggtttggcggcgttcatcgcgaacgacatccctgcggagaagataccgcacattaccgccagcagaagccctttcttcagattgaactcttcggctttgatgcccattttgcgctctttcagctggcctgcgcgggtgacgatgccgacgccaatcaccgccaccagcacgccgagcagcgtcatttgaccgccctgggtgtgcatcagcactgcaaactgaccgttaataatcggcgtcatcagcgtgccgacaatcagcgtgatgccaatggcgatgccaatccccatcgacatgccaagatagcgcatggtcaggccatagttgatattaccaatgccccacatggcgccgaacagaaagaccggcagcagcgtggaggcgctaaaagagcggtagtaggcccagaagtcgggtaacagcgtggcgctgatggcccagggcagaatcagccaggagacgatccccccgaccgaccacatggtttcccacgaccagtgttttactttcttgaacggggcatagaaacaggcggcactggcggcccctatcaaatgccaaaaaatacccatcgtaatcgcgtggttcattgattttatcctcatctttttttatcggagacggcggcttccgatgggatgagtgtaaaaattggccgctttggccgccttcaggacgttgccacaggatggctaaccctggcaaccatgggcttaattagttgttctacatcacaaaacgacgggtatttcttctggttatatccatatgaaaaatacggcattgataagcattttcaataccatttaattaactataatggacaaactgcttacgcggcgttaacacttgagccgctcgacaataatggagatgattatgagctataccctgccatccctgccttacgcttacgatgctctggaaccgcacttcgacaagcagacgatggagatccatcacactaaacaccaccagacctacgtgaacaatgccaacgccgcgctggaaagcctgccggagttcgctaacctgtccgctgaagagctgattaccaagctggatcagctgccggctgacaaaaaaaccgtactgcgtaacaacgccggcggccacgcgaaccacagcctgttctggaaaggcctgaaaaccggtaccaccctgcagggcgacctgaaagcggctatcgagcgcgatttcggttccgtggagaacttcaaagcggaattcgaaaaagccgctgctacccgtttcggctccggctgggcgtggctggtcctgaaaggtgataaactggccgttgtctccaccgccaaccaggattccccgctgatgggcgaagccatttccggcgcttccggcttcccgattatcggcctggacgtctgggaacacgcttactacctgaaattccagaaccgccgcccggactacatcaaagccttctgggacgtagtgaactgggacgaagctgcagcgcgttttgccgccaaaaaataaggttgcattgcgctaaaagagaagcgagtctgatgactcgctttttttatatctgtagcaaggagagcagccatgcattatccggtgaatgtctttgtcggcaaaatcagggactacgcgggcagtcgccccagcgcgatcgacaaaatccaggtcgacggagaattgcagctcggcgatctcggtctcgatggggaccagcaggcggagaagaaaatccacggcgggccggaccgcgcgctgtgtcattatccgcgcgaacactatgccgactggatccgtgacttcccccagcaggccgagcggttctgcgcgccggcgttcggcgaaaacctctccaccaccgggcttaccgagcaaaacgtttatatcggcgatatctttcgctggggcgaggcgctgatccaggtcacccagccgcgatcgccgtgcttcaagctcaactttcattttgcgatcaatgatatggcgcagctgatgcaaaacagcggaaaaaccggctggctgtaccgggtgattgccggagggcaagtttccagcgatgcgccgctcgagctggtttcccggctgagtgatgtcagcgttcatgaggccggggcgattgcctggcagatgccgtttgatgatgatcagtaccaccgcttattgtcggcagcgggcctgtctgttagctggagccgaacgatgcagaaacggcgtttaagcggcaagatagaggatagttcgcggagattatgggggaaataatcccccatattaagtattcccgggatgctcccggcgcagcgccgcacagcgcaggccgggtcggcgtcaggttcgtttatacagcggcagccagattgttaaacgcagaccacccagcgggctgtcgtcggccttcacccagccgcggtgctgctgaatagcggtttcgacaatcgccagccccaggccggtgccgccggactcgcggtcgcgcgcctcgtcggtccggtagaatggccggaaaatctgttcgcgatcctccgggctgactcccgggccgtcgtcatcgacgttaaccgtaatcccgtctttatccaccgagaagctgacggaaattttcgtatgcgagtagcgcagggcgttgcgcacgatattctccagcgcgctttccagcgcattagggttaccgtacagcggccatgggcccggcggatactcaacggtgaaagatttccccatctgctcagcttcaaaggccgcattgtccaacacttcgttccatagctgattggctttcaccgtctcgctgaccagggcgtttttcgcctgattgcgcgacatcaccagcaggtcgttgatcatgctgtccagccggtgcgcttcggtttcgatacgctccagctccttgctctctccgctgcggcgacgcagcagggcggtacccaattgcaggcgcgtaagcggcgtgcgcagctcgtgcgagatatcggacagcagccgctgctggctggtcatcatccgctccagggccgtcaccatctggttaaaactggcgccagcggctaaaaactcctgcggcccggcttccagctccggatgctggcgcaggttgccctgggcgacttcatcggcggcatttttcagcttacgcgccggtttcgccaggctccacgccagccacagcagcagcggggcgctgaccagcatcgtgacgatcagcagcagcagcggccggtcaaacagcaggttgataaagtcggattgtgaggtgctggcgggacgaatcagatagagctgatagttatcctccccgtcccggacggaaaacgggcccaccatttccaggcggccatagcgttttttctgcggatgatcggcgttatcggcctggccgataaagttacgaatgatctgcatttcgttgcgttctgcgccgatcacgcggccttcgctggtcaccagcagcaggcgttgtcccggaggcgcccatttatcgatggcgcgaaacaaacgacgccaccacatcaggtcgtttggcggatcgttggccagctcggcctcgacgtgctgctcgatcatgatgccctgacgctgctcgctttccagcagctcggtcatctgccgggaatccagtttgggcaacatcagcaccagcatcaacaccagcgccagcgtgagccagaagatggcgaagatgcgtgcagtcaaacttccaatcatgaagcggaaaccatcagatacccgcggccacgcagcgttttaaaccacggatggccatctttgcgctccggcagcttacgccgcaggttggaaatatgcatatcgatggcgcggtcgaacggcgtcaggcgcttgcctaacacttcctggcttaaatgctcacgggagactacctgaccgagatgctgcgctaacagatagagcagggtgaactcggtgccggtgagctccagcgtctggccatcgaaattggcttcctggcggcccggattgaggcttaaggcatccacttccagggttggtgagccggcttcggtcgtctgctgctgctcgctccagtgggaacggcgcagaatcgcgcgtatacgggccaccagctcgcgatcgttgaatggcttaggcaaatagtcatccgcgcccagctcgaggccgagaacgcgatccagctcgcttccgcgcgctgttagcatgataaccggagtctggtgtgtctgacgcagctctttcagcgtatcgataccgtttttcttcggcatcatcacgtcgagcagcaataaatcaacgctgtcgtccagaagggccagcgcctgttccccatcatgggccaccagcacgttaaaaccttccatatcgagcagctcttttaacagggaggtgagctcccggtcatcatcaactaacaggattttattcattgtttaaatacctccgaggcagaaattacgtcatcaaggcccgctaatccatgactttacgttgttttacaccccctgacgcatgtttgcagcctgaatcgtagactgtctctcgttgaatcgcgacacaaacgttttgggagtatgtgatgcgcaatgttatcgctgccgtcatggcctcaacgctggcgctaagtgcatatagccaggccgctgaagtcgttaccagcgttaactggctccccggagacgacgggggacagcgcggtagccaaagccatatgtttgacggcataagtttaaccgagcagcaacgtcagcagttacgggatcttatgcaacgggcacgccacgacaggctccccgttaatgttagcgaaatggagacaatgcatcgccttgtcaccgcagaaaattttgatgaaaacgctgtgcgcgctcaggcagaaaagatggcgcaggaacaggttgcccgccaggtcgagatggctaaggttcgcaaccagatgtaccacctgcttacgccagagcagcaagcggttttaaatgctaagcaccagcagcgtatggatcagttgcgtgaggttgcaaggatgcagaaaggctcagcgatgatgctttcgagtagtagcaacaccctgcaaccccagtaacaaaccctgttttccttgccatagacaccatccctgtcttcccccacatgatgtgggggttttttttgccctttttacggtaaatcaactccttcgcctatcccgtgagcgtcacaagttcgggttatactaagcgaattgcaggagaaggagcctatatgaatcaatcttatggccggttggtcagtcgcgccgctatcgccgcgacggctatggcctccgcgttacttttgatcaaaatttttgcgtggtggtataccggttctgtcagtattctggctgcgctggtggattcgctggtggacattgccgcctcgctgaccaacctgctggtggttcgctattcgctacagcctgctgatgaagaacatacctttggtcatggcaaagcggagtcgctggcggcgctggcgcaaagcatgtttatctccggctcggcgctgttcctgtttctcaccggcattcagcacctggtgcgtccggagccgctgcaggccgccggcgtcggggtcgtcgtcacattgatcgccctcgttagtacgctggcgctggtgactttccagcgctgggtggtgcgaaaaacccagagccaggcggtgcgggcggatatgcttcattatcagtctgatgttatgatgaacggcgccattctggtggcgctgggcctctcctggtacggctggcatcgcgccgacgcgttgtttgccctggggattggcatctatattttatatagcgcgctgcggatgggctatgaggcggttcagtcactactcgaccgcgccttgcctgacgaggagcgtcaggacattatcaccatcgtgaccgcatggcccggcatccgcggggcgcacgatctacgaacgcggcagtcagggccgacccgctttattcagattcatttggaaatggaagataacctcccgctggtgcaagcccacgtgattgcagaccaggtggagcaggcgattctgcgccgtttcccggggtccgatgtcattatccatcaggatcccagctctgtggtgccagcggcgcagcagggcttttttgagcgttaggttatagtctgtaaactcgatgtaaaaatgtggggcagatcggcattttttgtataaattaccgccgtttggtctgacctgaatcaattcagcttgaggcgtttgatatactattgtcattagcgtcgtgcactcctggtgagggagcgcttcaggcaacagaattattttttgcttcctaagttcagaggtagtcatgattaagaaaatcggtgtgttgacaagtggcggtgatgcgccgggcatgaacgcagcaattcgtggcgttgtgcgcgcggcattaacggaaggtctggaagtttttggaatctatgacggttacctcggattgtatgaagaccgtatggttcagctcgaccgttacagcgtttccgacatgatcaaccgcggcggtaccttcctgggctccgctcgcttcccggaattccgcgaagaacacatccgcgctgtggctatcgaaaacatgaagaagcgcggcctggacgcgctggtggttatcggcggtgacggttcctatatgggggcgatgcgcctgaccgagatgggcttcccatgcatcggcctgccgggcactatcgacaacgatatcaaaggcactgactacaccatcggcttctttactgccctgagcaccgtggtggaagcgattgaccgtttgcgcgacacctcctcttcgcaccagcgtatctccgtggtggaagtgatgggccgttactgtggcgacctgaccctggcggcggcgattgccggcggctgtgagttcatcatggtgcctgaagtggaatatacccgtgacgatctggtggcagaaatcaaagccggtatcgcgaaagggaaaaaacacgctatcgtggccatcaccgagcacatgtgcgacgttgacgagctggcaagctacatcgagaaagagactggccgtgaaactcgcgccaccgtcctcggccacattcagcgcggcggttccccggttccttacgaccgcatcctggcttcccgcatgggcgcctatgcgattgagctgctgctgcagggccatggcggccgttgcgtcggcatccagaacgagaagctggtgcaccacgacataatcgatgccatcgagaacatgaagcgtccgttcaagaacgactggctggattgcgcgaagaaactgtactaagttacgcgccgaataaacaaaaggccttctcatggagaaggccttttttatggcggaaggtttattcgatatccagcgggtcttccgacaggatcatcccggtgttatcggcatacagatggtcgccggagaagaaagtcaccccgccgaaattgacgcgcacgtcgctttcgccgatgccttcgccagccgcgccgaccggaatcgccgccagcgcctgaataccaatgtccagttcctcaaggtcgtcaacctggcgcaccgcgccatagaccaccaacccttcccattcattctggacggccagacgcgccaggtcagcgtcaattaacgcgcgtcgtactgagccgccgccgtcgatcaggagaatatgaccacggccattctgctcgagcagatcgtagagcaacccgttatcctcgaaacatttaaccgtaatgatctgtccaccaaacgacgaccgtcctccaaagttagagaacagcggttccacgacgttgacatcttcctggtagatgtcacaaagctcggaagtatcgtatttcataggcttaacgttcagttgctgcgagagtttttagtatatcccgcgaatcgcattgttggcaaaatcatcaattgttaattgatatttgtcagttaagccatcagcttactggcaataattccgataacaaacagcaggttggttagtaaagcccctttgaccgtcttttcgagcattggccgcatcgccagcggatcggattcgcgcaggacgtagcgcgcctgtttcaccagcagcggcgtggcgagaataaacagccagccccaggctgaatgcagcgccagcaggttaaacagcgccagacacagcagggcgccgagcagcaggcaggcatgatagcggcgggcattgaccgggcccaggcgcacggcgagggtgttcttcccgttctgccggtcgctgtcgatatcgcgcagattattgatgttcagcacggcggtcgccagcagaccgcaggctgtcgccggcagaaaaatggccgcttccacattatgggcttgcagataccagctgccgaggacgctcagccagccgaagaaaacgagtactgagatatcacccagaccaatatatccatacggacgggtgcccaccgtgtaggtgatggcggccacgatagacaggcctcccagggcgaggaagccgatgaaatcgccgacgctctgccaggcggcgcacagcagcgccagaccaaacaggcagatgagtacgacggtgacgatcagggcgcgcttcatctgctgggggtaatcacccctttctgcatcccgcgcagcggcccgatgcgatccggtttatcgctccccttaaccgcgtcgccgtagtcattggcgaggttggaaagaatttgcagcaagccggcagtgatcagcgccagcagggcaacccagggatcaaaatggccctgctcccaggcaaggacggtgccaacaataatcgcggcaaatgccagcggtaacgttttaggacgcaggctttccagccacgcctgtgaacggctgatatcagtcatagttattttagccaataaaaatgggggcgatagcccccatcaacagtgatgaaaatgcattgcaccggattataggataaaacggctcagatcttcatctgccaccagaacatccaggtgtttactcacatattcggcatcgatagtgacggtctggccgttcatctcgctggcatcataggagatatcttccaccaggcgctccagcacggtgtgcaggcgacgcgcaccgatgttctcggtggtttcgtttacctgccatgcggcctgggcgatgcgcttgatgccgtcttcggtgaattcgatgttcaccccttcggtcgccatcagcgccttgtactgcacggtgatggaggcattcggctcggtcaggatgcgctcgaagtcgtgggtggtcagcgccttcagctcaacgcggatcggcagacgcccctgcagttccgggatcagatcggatgggctggccacctggaatgcgccggaggcgataaacaggatgtggtcggtcttgaccatcccatgtttggtggagacggtgcagccttccaccagcggcagcaggtcgcgctgtacgccttcgcgggagacgtccgggccggaggtgttgccgccgcgcttacagattttgtcaatttcgtcgataaagacgataccgtgctgctctacagcgtcgatggcttcctgcttcagctcttccggattgactagtttggccgcttcttcttcaatcagcagcttcatcgcgtctttgattttcagcttacgcggtttctgcttctggccgccgaggttctggaacatagactgcagctggctggtcatctcttccatgcccggaggggacatgatttcaacgcccatcggcgccgcagcgagatcgatttcaatctctttatcgtccagctggccttcacgcagttttttacggaacgcctggcgcgctgcagacggttcctgcgacggctcagtctggccccagttgttcttcgccggtgggatcagcacgtcaagcacgcgctcttccgccagctcttccgcgcggtaacggttcttatcgatggactgcatgcgaaccattttgatcgccgcatcggtcaaatcgcggatgatggagtccacttctttaccgacatagcccacttcggtgaacttcgtcgcttcaactttgataaacggcgcgttagccagttttgccagacgacgggcgatttcggttttaccgacgccggttgggccgatcatcagaatgtttttcggcgtgacttcatgacgcagctcttcgttaagctgcatccgacgccagcggttacgcagggcgatagcaacagaacgcttggcggcgtcctgaccgataatgtgtttgtccagttcgctgacaatttcgcgtggggtcatttcagacatgggagatccttacgctttagaaggtaattcttcgatggtgtggaaatggttggtatagatgcagatatcacctgcaatatccaacgctttctcggcgatgtcgcgcgcgcccatatcggtattttccaacagcgcgcgggccgcggcctgggcgtaaggaccgccggagccgatagcaatcaaatcgttttccggctgtaccacgtcaccgttaccggtgatgataagcgacgcgttttcgtccgcgacggccagcagcgcttccagtttgcgcaacatccggtcagttcgccagtctttggccagctcaacggcggccttcaccagatggccctggtgcatttccagtttacgttcaaacagttcgaacagcgtgaaggcgtcggcggtgccgccagcgaaaccggcaatcactttgtcgttgtacagacgacgcactttcttcacattgcccttcatcacggtgttgcccagcgtggcctggccatcaccggcaataacaacatggccgttacggcgaacacttacaattgtagtcacgagcagaccccttggttgcaaaagcggaacaggggccccgcgctgtccgcggggccgaatgcaattatagatggggggattttgagggtttcaacccctggcggcgagacgaatgcagttcgcgtgtccagccatcttcaggcgggtgatcatctcgttggcgctttctttgcctttcaacgggccaataaccacgcggttccagccgttgttagtggtaatgtgcgaagcaaacccttcgaaagccagctgagcgcggacggtttcggcctgctcggcgcctttaaaagagccgcactggatcatccagctacgatcgtctttcttctcggcggtggttttcggcgcttcttccacccgagttaccggcgccgcggcctgggtacgcggctgcgtggtattggtatgcgctggcgtctgcagcagatcctggtacggctgctggtttgacgcggtctgcttcggttgttgctgctgaaccggcttcggctgctgaacgcgcggcggctgctgttggacggtctgcgcctgagtctgcgcccactgttgctgctgcgcctgctgctgttgctgcgctaaacgctgacgctgaagcgtctgctggcgctgcgccggcgtttgttcgttccacggcacttcggtcagctgggtcggctgctggcgcatatcggcctgcatctgggcgagcagctggcgctgctcgtcggtcagctgttccggtttcatgacttcgccaccggcggtcggttcggtcggcgcgcggacgccaggctggcggctttccagctctttaatatagcgccagcgctcttccggtttgggcggcaagccgttgccggcggcctggcgattttgcatcgcttccgcttcttctttcttatgatgcgtaatgaaatagaggccaccgataaaggccaccagcacagccgccgcgatcgccaccatcgccggtgaaatcgccggaaggctgctttgcttattccttgagcttcgggtcgtgctctttttgcgccgcgaagaagccggttggctgcggcgtacataatctcgttgtgccactatcgtttcgctgtcttatattcgttcgtcagcccgccatgttacttaagcggcgggcctttgaccagaagagcaggcccgaaagcctgatggttatcgtctgattttttgcgtactgccgcgaacaatcagttcgcaatcgagcagacgcgagccgctgttcacgttatgcccctgcatttgctccagtaatagcagcattccttcacggccgatatcaaaccgtggctgtgaaaccgtggtcaacggcggatcgcaaaattcagacaacgcgatgttatcgaagccgacaattgacaggtcgtccggcactttcagaccgcgacgttttgccagcgataaggcgcccagcgccatcacatcgctatggcaaaagaccgccgtgggcggcaccggctgcgccagcagctgctccagcgcattggcgccggcttcgaaggtaaagttgccgcgagcaatatagtgcggatcgacggtgataccgctgcggcgcagcgcctgcacataaccctgcaggcgataatggcacaacggcatatcttccgggccggcgatacagccgatacgctgatgtcccagctcgtggagataatttaccgcgttaaaggccgccgtcaggttatcgatatggacggtgggcagctccagctccggcgcaaactcattcgacatgaccattggcggcaaattgcgctgctcttccacgctggcgtcaaacggcaggcgcgagctgagcagcaccatgccgtcgatctgcttggtgatgataaggtcgataaaggttttttctttctgattctggtgggcgcaatcgccgattaacaccagatagccgtgctcggcggcagtgacttcaataccgcggatcacttcactaaagaagggatcgcagatatccgggacgatcacgaggatcgtccgcgattcgttgcgcttcatattgcgtccgagcgactgcggtaaatagccgacttccagcgccgcctgctcgacccggttacgggtggcttgcgacaccttatcagggttcatcaacgctcgggacacggttgccgtggaaacgtttgccttgagggcgacgtctttcatggtggcggcaaccacttgttttttgggcttcacctggtttctcctcgctgaatggcgctggcatttcccttgggcgctaactgctgcatcatttttatcagatagtcgcggcagtgagttacagaattttcatgaaaaacgtgatgcttgttaaatttttcgatccggctcgcaagagaaggcttatccttcaatcggatcgacatccagcacccacttcacttttctcgcctccggaagcgtattgatcagcgccagcgtaccgctaacgatatgttgcagacgcacccgcgaaggatgctgcagcaatatttgccagcgccagcggccgccgcgctttggcgccagcgccggaaccggaccgagcacccatagcttttcgtcggccagcgggctggcctgcagcagattgcgcagctgttgtaaaaacagcggcgcctgctggttgttatggtcttccgcacgaatcagcacatggctggtccacggcggcagctgcatcgtctgccgctctgccagcgcctgttcggcaaaggcgtcgtagcctttatacagcagggtctgcagtagagggtgttccggatggtgggtttgaagaatgacctcgccctgttttcctgcccggcccgctcgtccggagacctgggtataaagctgagcgaaacgctctgcggagcggaaatcagcggaaaacagcgccccgtcgacatccagtagggagacgagagtgacgtccgggaagtggtgccctttggccagcatttgggtgccaatcagaatacgcgccccgccgcgatggacggcggcgagatgctcctccagcgctcctttgcggctggtggtatcgcggtcgatacgcgagataggcacctcagggaacagcggcgccagggcctgctccagctgctcggtgccgatccctaccggcaccagatgcgtggagccgcaggaaggacactggcgcgggatcgggcgctggctgtcgcaatggtggcagcgcagatggtgctgcgcctggtgcaacgtatagtaactgtcgcagcgcgggcattccgctatccagccgcaatcgtggcacagcagcgctggcgcaaagccgcggcggttaagaaacaggatcacctggttatccgcttgcaggtgctggcgcatacggctaatcagcgcgggagacaggcccgcctgcagcggttgccctttgagatcgagcacgtgctgctgggccgggcgcgcattgcccgcgcgtttgcttaaggttaactggcggtatttaccctggcggacgttatgcagagtctccagcgccggcgtcgccgagccgagaattatcgggatctgctcgctgtgggcgcgccataccgccaggtcgcgggcatggtagcgccagccttcctgctgcttgtaggagctgtcatgctcttcgtcgatgacgatgacgccgagatctttaaatggggtaaacagcgaggagcgggtgccgatcacaatggccgcttcgccatttttcgccttcagccaggccgagagacgttcgctgtcattgagcccggagtgcagcacttccaccggcgcgttaaagcgctggcgaaatcgggcgatggtttgcggcgtcaggccgatctccggcaccatcaccagcgcctggcgcccctgcgccagcacattctccagcacgctcaaatagacttccgttttcccggagccggtaatacccgccagcagccaggcggagaaacgatcggcggcgctgtggatcgccccgacggcggtggcctgctcggtattcaggcgcaggcgttcgccggcaaccgaatacgcgctgcgccagtcggtgagggcgggcgcttcgcaggccagttccgccagccctttgccgcgcagcgcctgcagcgccgcttcattgaattccagttcgccaacctgatgacgccagattttgccctggcgcagcgccgccagcgcctgctgctgcttccgggagcgtttcagaccgttaaggtcgacaacctgcccctgctcggtggcgaaccagtaccacagcggcgtggcgctggcgggtttgccctggcgcagcataacgggtaatgcatggaacagcacatcgccgatcgggtgatggtaatactcagccgcccacatcagcagtcgccagacagtcgtggagaagaccggctcgttgtccagcgcttcggcgaccggttttagctcatccagcggcagttcgctgcgctcgctcaccgccgcgacaatgccgatccgctcctgtttgccgaacggcacccgcacccgacagcccgctttgaccgccatgccttcaggcagcaggtagtcaaaagtgcgcggtagcggaacgggtagggcaacgtgggcgacggacatgtcatcttcctgacttgaaatctggcgggatagtatacacattacgataaggcggcgcggatcagtttgcatatgctggtcaaattctgtatgattcgccgcctttgatgcgctttatatcgcattgaagattgaccattaccgcgtgcttcacgctgtcagcagcgtagaaggcgacgggaaattactaatatcgcgtggtgtctggcgttagggctggaagagcgacgcggccttaactgaggttctcccatgaaaaaaggtattcacccaaattacgacgaaattactgctacctgttcttgcggtaatgtcatgaaaatccgctccaccgttggtcacgacctgaacctcgacgtgtgcggcaaatgccacccgttcttcaccggcaaacagcgtgatgttgctaccggtggccgtgttgaccgcttcaacaagcgcttcagcatcccgggcagcaagtaagttgccagaagaagccgcctcagggcggcttttttgtctctcccgcctgcctgggcgggaaagaaaaaagggcggaagattattccgccctttttatcgtctcagtattcccacgtatccgggtcgattcccagttcacgcataatcgctttcgccgcttccgggatctcatcgctgcgctctttacgcaggtcttcatcgttaggcaacggttgtccggtaaaggcatgcagaaacgcttcgcacagcagctcgctgttggtcgcgtgacgcaggttattcacctgacgacgcgtgcgttcatcggtgaggatttttaacaccttcagaggaatggaaaccgtaattttctttacttgttcactcttcttaccgtgctcagcgtatgggctgatatattcgccgctccattcagccatgagataccttaatcctctgtttattagtgaagggccagaatattccgcccgggctataattgcgcgtagtttaccgtatgcgcgggctttctgacatgagataagccgccgacgacgtgcgctaatgcatataattttaacggctatttgcactttgctcaatctatacgcaaagaagtttagatgtccagatgtattgacgtctattgtgacaatgattactctggagcctgacttttcaccgattcagcccaggaacttcccaacatgacgcgtaaacaggccaccatcgcagtgcgtagcggtttaaatgacgacgagcagtacggttgcgttgtcccgccgattcacctctccagtacctataacttcaccggctttaatgaaccgcgcgcccacgactactcccgtcgtggcaatccgacgcgcgatgtggtgcagcgcgccttagcggagctggagggcggcgccggcgcggtgctgaccaataccggaatgtcggcgatcctgctggtgacgacggtgttccttaaaccgggcgatctgctggtggcgccgcacgactgctacggcggcagctaccgtctgttcgacagcctggcgaagcgcggctgctatcgcgtccagtttgtcgatcaaagcgatgagcaggcgctgcgggcggcgctggcggaaaaaccgaagctggtgttggtggaaagcccaagtaatccattgctgcgggtggtggatattgcgaaaatctgtggtctggcgcgtgaggccggggcaattagcgtggtggacaacaccttcctgagcccggcgttgcaaaacccgctggcgctgggcgccgatctggtgctgcattcctgtaccaaatacctcaatggtcactccgatgtggtggccggggtggtgattgccaaagatccaacaactgtcaccgaactggcatggtgggcgaataatattggcgtcaccggcagcgccttcgacagctatctgctgttgcgcgggctgcggacgctgtctccacggatggaagtggcgcagcgaaatgccctggcgatcgttgagtatctgaaaacccagccgctggtgaaaaagctgtatcatccatcgctgccggaaaaccaggggcatgaaattgcggcgcgtcagcaaaaaggttttggcgcaatgttaagcttcgagcttgacggtgacgagcagacgctgcgccgttttctgagcgggctgtcgctgtttacactggcggaatcgctggggggcgttgaaagcctgatttcccatgcggcaacgatgacgcatgccggcatggcgcctgaagcgcgtgccgccgccggaatttcagaaacgctcctgcgtatatcgaccggtattgaagatggtgaagatttaattgccgacctggaaaatggcttccgggcagcaaacgaggaataaagatgagtgtgattgcgcaggcaggggcgaagggtcgtcagctgcacaaatttggtgggagtagtttagcggatgcgaaatgttacctgcgcgtcgcggggatcatgaaggagtattcgcaggcgggggatatgatggtcgtctccgccgctggcagcaccaccaaccagctgatcagctggcttaagcttagccagagcgatcgccttgctgcgcatcaggttcagcagtcgcttcgccgctatcacaccgagctgattggcggtctgctggagcctgcggcggcggatacgttgatagccgcctttatccacgaccttgagcgtctggctggtctgctggacggcggggtttccgaagcggtctatgcggaagtggtcggccatggggaagtgtggtccgcgcgcctgatggcggcggttctcaaccagctgggtatggaagccgcctggctggacgcgcgcgcgttcctgcgcgcggaacgcgccgcgcagccgcaggtggatgagggattatcttacccactgctgcagcagctgatggcgcagcatcctaacaaacgtctggtggtgaccggctttatctcccgcaaccaggccggcgaaaccgtcctgctgggccgtaacgggtctgactactctgccacccagatcggcgcgctggcgggcgcctcccgggtcactatctggagtgacgttgccggggtgtacagcgcggatccgcgcaaggtgaaagacgcctgcctgctgccgctgctgcgtctggacgaagccagcgagctggcgcgcctggccgcgccggtgctccatgcccgcacgctacagccggtttccgccagtgatatcgatctgcagttacgctgcagctacacgccggaacagggttccacgcgcattgagcgcgtgctggcctccggtaccggcgcacggattgtcaccagccatgacgacgtctgcctggtggagttccaggtgccggccggtcacgatttcaaactggcgcataaagagctggacgctctgctcaaacgcgcccagctgcgcccgttagccgttggcgtccatgccgaccgtaagctgctgcagttctgctatacctccgaggtggccgacagcgcgctgaaattgctcgatgaagccggtctgccgggcgagctgcgtctgcgtcagaagctggcgctggtggcgatggtgggcgcgggagtcacccgtaacccgctgcactgccaccgtttctggcagcagctcaaagggcagccggtggagttcacctggcagtctgaagaggggatcagcctggtggcggtgctacgcgccgggccgacggaaagcctgatccaggggctgcatcagtccttgtttcgcgccgaaaagcgtattggcctgatgctgttcggcaaagggaacattggttcccgctggctggagcttttcgcccgtgaacaaactacgctctcggcgcgtaccggtttcgagtttattctcgccggcgtagtcgacagtaaacgcagcctgctgaattacgacgggctggatgccagccgggcgctggctttcttcaacgatgaagcggtggagcaggatgaagagtcgctgttcctgtggatgcgcgcgcacccgtatgatgatttagtggtgctggacgtcaccgccagcgaacagctggccgaccagtatcttgattttgccagccatggcttccacgtcattagcgccaacaagctggcgggcgccagcagcagtgataaatatcgtcagatccacgacgcgtttgagaagacggggcgccactggctatataacgccaccgtgggcgccggcttgccggtgaaccatacggtgcgcgacctgatcgacagcggcgatactattctcggcctgagcggtatcttctcgggaacgctctcctggctgttcctgcagttcgatggcaccgtgccgttcaccgacctggtggatcaggcgtggcagcaggggctgaccgagccggatccgcgcgtcgatctgtccggtaaggatgtgatgcgtaagctggtgatcctcgcgcgggaagcgggctatgacatcgaaccggatcaggtgcgtgtggaatcactggtgccggcgcactgtgaagaggggtcggtcgatcacttctttgagaatggcgaagagttgaacgagcagatgctgcagcgtctggaagcggcccgcgagatgggactggtgctccgctacgtggcgcgctttgatgccaacggcaaagcacgcgtcggtgtggaagcggtacgcgaagagcacccgctggcggcgctgctgccgtgcgataacgtgtttgccatcgaaagccgctggtatcgcgataacccgctggtgatccgcgggccaggcgccgggcgcgatgtgaccgccggggcgatccagtcggatattaaccgcctggcgcagctgctgtaagcgtcgcgttatactcttgaaccagtgagaccactatttgcgttacgcgccctgcggaatacagggcgctctgcgcaaacgcgggtctgtttttcagccatattgtaaaccgtcggctggccgcaaggtctggtagaaaggcgttctcttctgcagtgccggcaagccggcagaccattttctgattctcttcctgcgtccaacgctgccatgaattttgccaccagccatgatgggttttcccctgtagctgccacggagccgggctggctgggttccttatctcttcttccacataccatagatcgccttgccgctgacgaaaaagcggcgcccaggcaacgatcgccgcgccgcgtaaaaagcattcatgcgcaataacgtgcgttttcacctctggaaaccgctggctgagcagtttgaaatgaccgtgcgcggcgataaccgggcgcaatatattgccgcgggcatggcgcttttgcattgcgctgccgtactggatttcatcgaactgactgcgttgtaaaaagcgcatttcagtgagagaaatacgttgaataatatcgtcagtctcctccctgtcggcttgtccgccgcgccagtgatagcgtaatgattcgcctaccgcgaaaggagtgaaattagaggtaagatgaataacattaccgcgcacggcatcaaagcttaataaaaaatagagcttttgcccggcggcattaccctggaatagcgctatcaacggtacgctgcaaatacgtcgtggggcttcaattggggcgatgtgtgggaattttggcgtccagacctttttacagtggcggcactgaaggcgttgcgtaccctgcggattgcggccgtagcgaataatatcccgctgatagcataccgggcaaaaatagccgtagcggcgggcatgatccgtcagataagccgccagccaggggcggaattcccgttcgttaaacagggggggatagctgccgcaggctgcgcagtagagcgccgggtagcccagccgaaaattcgggaaatgatactcagccgcagacggtaaacctaaattgcggcagccaaaagttttacaggcgttaatggtaaagagagtatccactggcaggtcaataccaacgatttttacaggtcgttaattttgtcctgctcaggttgcatacaactgtgaatgctctcacataaaaaagtctttcagaacgtaacttagcggttctttatcactctgaaaggaactccgatgaaactaaaaacaatgagcgcagcacttctgttaactttgcctttctgggcctgcgccaaagatgtcaccataatttataccaacgatcttcatgcccatgtcgaaccttataaagtgccatggattgcggatggtaaacgagatattggcggttgggcgaatatcacgacgatggtgaaacaggaaaaagcgaaaaataacgcgacctggttttttgatgccggagattatttttccgggccttacatcagtagcctgacgaagggcaaagcgataatcgatattatgaatacgatgtcctacgatgcggtgactatcggtaatcatgagttcgatcacggctgggataatacgttgcttcagcttagccaggcgacattcccgattgttcagggcaatattttttatcagaacagcgataaatcgttctgggataagccctataccattatcgaaaaagatggcgtgaaaattggcgtgattggcctgcacggcgtgtttgcttttaatgacaccgtttctgccgcgacgcgagtgggtatcgaagcgcgcgatgaggtgaaatggctacagcattatatcgatgaacttaacggtaaagtggatctgaccgtggccctgatccatgaaggcgtcccggcgcgtcagtcgagccaggggggaaccgatgtgcgtcgtgcgctggataaagatattcagactgcgggtcaggtgaaaagcctggacgttttaattaccggccatgctcacgttggcacaccggagcccattaaagtgggtaatacgttgatcctttctaccgatagcggcggcatcgatgtgggtaaactggtgctggattatcaggagaaaccgcaccaattcacggtgaagcactttgagctgaagacgctttatgccgatgagtggaagcctgatccgcagacaaaacaggtcatcgacggctggaataagcaacttgatcaactggtgcagcaggtcattacacaatcgcccgttgaactgacccgtgcgtatggcatctcttcgccgttgggcaatcttgccgctgacgccttgctgttggcagcaggtaggagtacgcagatggcgttaaccaactcgggcgggatccggaatgagatccccgccggggcggtgagcatgggcgccgttatcagcaccttcccatttcccaacgagctggtcaccatggatctaaccgggaagcagttgcgtagcctgatggagcatggcgccgggttgagcaacggcgtgctgcaggtctcccggggactggaaatgatgtatgacagcagcaaacctgtgggccagcgcgttgtgttattcaggctaaacggtaaaccgattgacgatacgacggtttaccatattgccaccaacagcttccttgcagatggcggcgatggttttgtcgcgtttaccgaggggcaggcgcgtaatacctccggcggctattacgtttcaaatgcggtcgtagactatttcaaagccgggcaaaagataacggatgagcagcttaacgggcagcgcgttgtcgatgtgaagaaataagtttttaaggccgggcagtcagcccggccttaagcgatcagtgggccgcaaataccgccctggcggcaaacaggccgttgagggccgccgggaatccggcatagactgccatctgcatgatcgcttccgtaatctcctcttgcgtcaggccgacgtttaatcccgcggcaatgtgtactttcagctgtggctcggcgttacccaacgccgtgagcgcggcgatggtggcgatttcccggctgcgtaaatcgagccctggcctggcgtaaatatcgccgaaggggaactcaatcagatagcgggcgaaatcgggggcgatatcccgcaggctgtcgacgacagcttccccgcccttaccatccacccgctgaagcatttcctgaccgatgatataacgttcgctggacatcgtttttccctctctgtgatggtgcgttaagaggaagggtagggaagtgtgccggacttgagtaatacccttttcgtgataccttttcagtatgacaacttcaagattacattctctggatattcgcctgctgcgcgcctttgccgtggtagcggaggaaaataacatcagccgggcggcgcagcggttatttatctcgcagccgccgctgacccgccatatccgccatctggaagcgcagctgggggtgacgctgtttcagcgccatagcaaaggcctgatcctgaccgacgcgggtaaagaggtgctggagatgattcaacctctgctggcgctccaggaacgcacgctggcggcattgagtgagctcgccgttcactcgccgcaggctctacgtctgggcgtgacgacggccttcgaacagggcattttcgccgccgttgaggctgcgctgagcgaacatacccgcgcgttgcatatcacccgccacgcctcaccggcgctggctcagcaggtacgcaaaggcaaactcgatgcggcgctggtcgcgctgccgctcaatactgaagggctgcacctgcacccattgccgtatcatgagccgctcattgcggcattaccggcctcctggccggaagccggcaggccagggctgacgttaagcgcgctcaatcatcggccgctgttctggtttaaacgcgagcgtaatcctggtttctttgactacacgcgccgcattttcgaccgggctggctatgccccgacgtatgtggaagagccggccgagcatgatgtgctgctggcgcgtattgcgcgcggggaaggcatgatcctgctgccggcgtccttttccgcgattcagcgtcagggggtggcgttctgcccggtggctgagggcgacgcgatgccgttaagccttggggtgatttatccgcctcaccaggcagagtccgtgcagcaatggctttctctgctggatggcattctggcgactggctagtctcaggctgactcgcgagccaccttatattgcccaccgagccgcttcctgtgcgtggccaggtgatcggaagatgaaattttttcatgtaggtgacctattcctcactctttacgcagatttttctattgacgcccgcgcgcttttccgtcatttttacatctggacgtctaaacgtatagaagttcgcaatataacagccattacatgcgattgatgaggtaaggtatgagcttttttcacgccaatcagcgggaagccctgaatcagagcctggcggaagtccagggccagattaatgtgtcttttgaattctttccgccgcgcaccagtgaaatggagcaaaccctgtggaaatccatcgatcgcctgagcagtctgaaaccgaagtttgtttcggtaacctatggcgcgaactctggcgagcgcgatcgcacccacagcatcatcaaaggcattaaagagcgaactggtctggaagcagcgccgcacctgacctgtatcgatgccagccgcgatgagttgcgcactatcgctcaggattactggaacaacggtatccgccatatcgtcgccctgcgcggcgacctgccgccgggcagcggtaaaccggatatgtacgccgccgatctggtgacgttgctgaaagaggtaggcgattttgatatctctgtcgccgcgtatccggaagtgcatccggaggcgaaaagcgcgcaggcggatttactgaacctgaaacgcaaagtagaagcaggggccaaccgcgcgatcacccagttcttcttcgatgtggaaagctacctgcgttttcgcgatcgctgcgtctcggcaggcatcgacgtggaaatcattcccggtatcctgccggtctccaactttaaacaggcgaaaaagtttgcggatatgaccaatgtccgtatcccggtgtggatgtcaaaaatgttcgaagggctggataacgacgccgaaacccgtcaactggtgggggcgaatatcgccatggacatggtgaagatcttaagccgggaaggggtcaaggatttccacttctacaccctgaaccgcgccgagatgagctacgccatctgccatacgctgggcgtacgcccggcctgagttttcattaacgtttagtgcgatggcgaagccggtattcgccatcgcttttttttgcccaaaacgctgatacaggtcaggggagagcagaagataaagcgcgtatagtgccagcctgataattgacagggatgggttatgcaatggcaaggaagagcgatccactggcgtttggcggtttggcgttattaacgctgatctggagctttagctggatcgcgatgaagcaagtgacgagctatatcggcgcttttgacttcacggcgctgcgctgtatttttggcgccgtggtgctatggatagtgatgttgatccgcggtaaagcgctcaagccgacgcctttcggctacaccctggcgatcgcgttattgcaaacctgcggcatggtcggtctggcacagtgggcgctaatgagcggtggcgccggtaaagtggcgatcctgagttataccatgccattctgggtagtggtgatggccgcgttattcttaggtgagcgcatgcggcgatggcagtatatcgccatcggggtggcatgcgtgggcctgatactcgtacttcagccttggcaactcgattttacctccctgaaaagcgccttgctggcgatcctctccggcgtgagctggggggcaggtgcgatcgtcgcgaagcgtatgtatacccggtatccgcaggttgatttgctggcactaacgacatggcagatgctatatgccgccgtagtaatgagcgtagtggcctggctcgtcccgcaacgagcggtagactggcagcccgacgttttctgggccctggcttacagcgcaatccttgcaacggcgctggcctggagtctgtggctttttgtactgcgtaatttaccggcaagtatagccggtctgagtacgctggccgtaccggtctgtggcgtgctattttcctggtggccactacatgaaaatccaggaaaggtggaaggttgtggcattgcgttgatagtactggcgttggcgatgatcagtatcaagagacgaggggcatagcctgctccggcctgcagagatgcataaaaaacacccggctgtcgccgggtgttttgctctggtttattcccattcctgcaggaagcgctgaccatactggtcggccaccagcagcgcggcgtagacctggtcggaatcaacgccgcccggcatattgtgaatggtttcgccttcagcgcaggcggcttccgccaccagacgcattttggtcgggatatcacctttgatatccagctgcgccagggtgatcggcagcccaacgctgtggcacagcgcggcgacggtctctatttcgtccaccggcgcattttccagcaccagctgcgtcagggttccgaacgccactttttccccgtgataatagtgatgggcgtcagggatggccgtcatgccgttatgaatcgcgtgcgccgccgcgagaccaccgctttcgaaacccacgccgctcagataggtgttggcttccaccacccgctccagcgccggggtgaccacgtgctgttcggcggccagcatcgctttttcaccctcttcgagtaaggtgttgtagcatagctcggccagcgccagcgccgcctgggtgcacttcccgcccgccatggtggtggcgccgctacgggagcaggcgcgggcttcgaaccaggtagccagcgcatcgccaatcccggcggccagcaggcgggccggcgcgccggcaacgatctgcgtatcgacaatgaccatgttggggttgcgcggcagcatcaggtagctgtcgaattccccttcgtcggtgtatatcaccgacagcgcgctgcacggcgcatcggtggaggcgatggtgggggcgatcgccaccggcacattcataaagtgggccagcgctttcgcggtatccagggttttgccaccgccgatccccagcacggcggtgcacttcgcgttgccggcgatatcgcgtaggcggttgatttcattatgcgaacactcaccgccaaacggcgcgatttcggccgccaggccagcgtcggccaggcttttacgcagcatctcttccgcaaaccccaggacgaatttatcaccgaccaccagccagcgctcggccagcggtttcagatagtcgccgaggcgcttgatggcgcctgcgccctggatatatttgcctggtgattgaataatgcgatccatttcgattcctcctcgatgaccgtgacgccgcccgcaggcggctcgcggatccggttacagattcagcgtgccaaaggcgttattccagtcttgttcaaacttctctatggctgactctaccgcaggggtgccgagcatttgttgcgctacatctagtggaagggtgattgcttcgcagccagccagcagacaatccagcgcctggcgtggcgttttgaagcttgccgccagaactttgctctcgggcgcatgcatttccagcagggattgcagctcctgcaccatgcggatgccgtccccgccctgggcgtcgacgcggttaacgtaaggcgcgacgtactttgcgccggccagcgcggccagcaggccttgcgaagcgctgtagacggcggtgccaagggtcgggatgccttctttcttcagcagtttgatagcggcgagcccttcggcggtgaccgggattttgaccacaatgcccggcacggaattgctcagacgtttggcctcttccaccatgccctgcgcgtcgcggctcatggtctgcgcgaagagggtgcccttcggaccgacggctttttgcaggcgcggcagcacatcccagaccgggactttaccggcggcgataatgctcgggttggtggttaccccggccagcgggtagatgcgggccaggcgttccacttcggcgacgttggcggtatccagatagagttccattgtgttttcctcaatgcttaattcggtgctgtcgttgaggtaagcatacggctttcgttcgaaggatcgccagatgacaaatttgccaaaaactggataaatgtacgcatcgtgattaaggatgatttagatcacatttatcggtgctggctgggatgggaggtaactatagcgcgcacaaaagtcaggtttaacacacaaaaatctagttttttaccggggatgctttttccgtcagctggctatggtactggcggcggtattcagacggcgagcgttccgtagttttgcggaacaggcggcagaagtagttgctgtcggcgaagccgcaggcgtgggcgatgtctttcactttcatatcgtggcccttcagcagcatacgggcctgttcgagacgaatatggtttagatattcattgaagcccattggcccacatttctggaacagatgggaaagatagttgggagagaggtagaacgcctgggccaccgattcccggctcagcggttccgcataatggatgtccatatattggcggatcgcttcgaacaacgcctggctgcgcgaggaggtttgcgcctggctgccgagaagatcatggcagtggctgagcaggctgacgacgatgctgcgggcggtttgctgctcctgcggttgcatccggagttcattgagcgcctgcagcagaaatgatccgacgcgcggcccgcggcgcagcgcctgccgcttgtcgacaacagttatcgccttgccattccagtgctgcagcgagcactccagctgctgcttagcgaacaggatgcttaacagcaggcaaggcgcttgccactgcgggcagttccagctatcgccagggatatagagcacgtcatgggcctcaaggagcggggcgttatcgccgagcgcctggtcgggcaactgcccatcgaggaggatattcagacggggaaaatccacctgcaccaccggctcagcaggcgagcgcgtctcgccggcgaaataaacccggccgaggctggtctgcttttttagcaatgcatcaataagttgattgatatcgttgtccatcattcttccgttcagcgcatcacccttttcatcataccggacattattccagcggtaaaagcgcttgcctgtcgctcttgcctcccagataagatatgttatatcgtaacaatttgtcgccattgatagcaaactcaggagagagtaatgaccagaaagatccccctgctggccttaggattcggcatggctttagccagcgcccaggcgttcgcccacggcaaccatagccatggcccggcgttaaccgaagtggagcgtcaggccagcgaaggcatttttgcggataaagatgtgcaggaccgcgcgctgagcgactgggagggcgtctggcagtcggtgaacccgtatctgctcaacggcgatctcgatccggtgctggagcagaaggcgaaaaagcccggcggcaagagcgtggaggagtatcgcgcctattataagaagggctacgccaccgatgtggagcagattggcattgaagatgacgtgattgagttccacgttggccagaccgtcaatagctgcaaataccgctattcaggctataaaattctgcattacgcctccggtaagaagggcgtgcgttatctgttcgagtgccagcagggcgatgccaacgcgccgaaatttgtgcaattcagcgaccatatcattgacccgcgtaaatcacagcatttccatattttcatgggcaatgaatcacaggaggcgttgctgaaagagatggataactggccgacctattatccgtatgcgctgcataaagaacagatcgttgatgagatgctgcaccactagaacgggcggaaaacccccggccgggcggccggggggagatagattaaccggtgttacgcataccggcggcgacgccggcgatggtgaccatcagcgcttgttcaacgcgcggatccgggtccttgccctcttcttcagcctggcgtgaacggtgcagcagttccgcctgcaggacgttcagcgggtcggtatagatattacgcagctggatagactcggcgatccacggcaggtcggccatcagatgggagtcgttggcgatggccagcacgacgttgatatcggcagccagcagcttgcgcagctcggaacccagcgcccacagctccggcttcaccaggcgctgatcgtagtactccgccagccacaggtcggccttcgagtaaaccatctccagcatgccgaggcgggtagagaagaacggccagtcgcgacacatggcttccagttcactctgttttccaccttcgaccaccttctgcagcgcagcgccagcgcccagccaggccggcagcatcaggcggttctgggtccaggcgaagatccacggaatggcgcgcagcgactcgacgccgccggttggacgacgttttgccggacgcgaacccagcggcagtttgcccagctcctgctccggggtcgcagagcggaagtaagggacgaaatctttgttttcacgcacgtagccgcgatacatcttgcacgacacgtcggacagctcggccatgatgtcgcgccattctgctttcggctccggcggcggcagcaggttggcttccagaatggcgctggtatacagcgacaggctgctgatggtgacttccggcaggccgtacttaaagcggatcatctcgccctgctcggtaacgcgcaggccgcctttcaggcttcccggcggctgcgagagcagcgcggcgtgggccggcgcgccgccgcggccgatagagccgccgcgaccgtggaacagcgtcagttcaataccggctttttcgcaggttttgatcagcgcgtcctgcgcctggtactgcgcccaggaggcggccatcacgccggcatctttagcggagtcagagtagccgatcatgaccatctgcttgccctggataaagccgcggtaccagtcgatattcagcagctgggtcatgacgtcgttggcgttgttgaggtcatccagcgtttcgaacagcggggccaccggcagagcaaagccaatcccggcttctttcagcaggagatgaaccgccagcacatcggacggcgttttcgccatcgagatcacgtaggcagcgatcgatccgcgcggcgcctcggcgatcaccttgcaggtgtcgagaacttcacgcgtctcttcgcttggctcccactggcgcggcagcagcggacgtttggaattcagttcgcggatcaggaaagcctgtttgtcggcttccgaccagctttcgtagtcgccgatcccgaggtaacgggtcatttcacccagcgcttcggtatggcgggtgctttcctgacgaatatcaatacggaccagcggtacgccgaaagacttcacgcggcgcagggtgtcgagcagctcgccgttggcgataatgcccatgccgcaggcctgcagcgatttatagcaggcgtacagcggctcccacagctgctcgttctgagtgatcagtcccgccggtttcggcagcttctggcctttcaggcgcgcttccagccaggcctgggtctccatcagctgagagcgcagttttttcatcagataacggtacggttcctgagcgccctcggcgccagccagggcgcgcagctcgtcggtacactccaccatcgacagctcggagatcagcacctgcacgtctttgaggaacaggtcggtcgctttccagcggctgagcagcagcacgtggcgggtgatatcggcggtcacgttcgggttgccgtcgcggtcgccgcccatccacgaagtgaaacgcaccgggacaaagtccaccggcagctgatagccgaggttggcttccagctgttcgttcagctcgcgcaggtagttaggcaccccttcccacaggctgttttccaccaccgcgaagccccatttggcttcatcgaccggggaagggcggtgcttacgaatttcatcggtatgccaggactgggcgatcagctggcgcagacggcgcatcagctggtggtgctcgtagtccgcgatatctttgttatccagctgcttgaggcagttgttcacttccaccattttatggatcagcgtccggcgggtgatctcggtcgggtgggcggttaacaccagctccagggacagagattccaccgcttttttgatggtctcttcgttgagattgggttggtctttgagctttctcagggtacgcgcaatgacttccggattgctggccgcttcgccattcggcgaaatgctgtggtactgctcagcggtgttagccagattcaggaactggctgaaggcacgggctaccggcagcagttcgtcgttagacaaattctgcagcgtggtcagcagctcctggcggttagcttcgttgccggcgcgtgaagatttggacaacttacggatagtttcgacacgatcaagaatattttctcccaatgcatccttgatggtatcgcccagcaccttgccgagcatactgacattactacgcaatgcggaatattgttcgttcatgttaccccagacaccccatctcattttattttgttatatccgctgcgctggaacgtgagcaacggataagcaacccgtcttttataaagccacgtaaatacccccacgtcaattactgcgaaatcgcttcagcaaacgagtaaatacccgtaatttgcgaaatttaactcagggggcgctggataagcatcgcttatggaaatgtgacgatcgtcaccgttccgccccgggagaacggggcggaaaaagagggcgattttagtgccagcagaagtggtggaccacctggctaatcagctcccgcgtcggcttgataaagcgcgtctccagaaactcgtcaggctgatgggcctgattgatggagcccgggccgagaaccagcgtcggacacagcgtctggataaacggcgcttcggtgcagtagttcaccacgtcggtctgcgcgccaagcagtttctcgaccacctgcaccagcttatggtccggcgggcactcgtagccggggatcggcggatgcagctcagagaacgtcaggcggcccggccagcgttcgctgaccggggccagcgcctcgcccaacagaccattaagatcgtttagggtcatccccggcagcgggcggatatccatatgcagttcacagcaggcgcagatacggtttgaggcatcgccgccatggatagcgcccaggttgagggttgggtaagggaccgtaaacgcctcgaagtgatagcgctctttaagcagatcgcgcaactgcataatccggccgatggcgtcgtgcatcagctcgatcgcgttgaccccgcgcgccggatcgctggagtggccggactggccctgaatacggatcgcgttggacatatgtcctttatgggcgcggattggctgcagggaggtgggctcgccgatgatggcgcagtccgggcgcagctgggtggtttcggcaaaatagcgcgcgccagccatgctggtctcttcgtcggcggtggccagaatatacagcggttttttcagcgtggtgacgtcgacatcgcgcagggcgtcgagaataaaggcgaaaaagcctttcatatcggccgtgccgaggccgtagagtttgttatcgtgttcggtgagggtgaacgggtcgcgcgtccagcggccatcatcgaacggcacggtatcggtatgcccggcgagcagcaggccgccggcgccgtgtccggtgctggccagcagattgaatttatggcgcgtatccggcaccggctgtacctcgacgttgaagccgagatcgcggaaccagccggccagcaaattgattaaagactcattgctctgatcgagagcctcttcggtcgcgctgatggacggtgtggcgatcaacgcgcggtagatctcgataaagggcggtaaattgtttttcattgttgacacaccttgggtcgtgatagtatcaatattcatgcatttattgtgaataaaaatacaatatcgttgagcgtaagaaaacccatcgaatgtaaggagatgcgcttccaatgttaaatacgctgattgtgggtgccagtggttatgccggcgcagagctggtgacctatatcaatcgtcatccgcatatgaacataaccgctttgacggtctccgcgcaaagcaatgatgcgggaaaattaatttccgacctgcatccgcagctcaaaggcattgtcgatatgccgctgcagccgatgtccgatatcagcgaattcagcgctggcgtggacgtggtgtttctcgccaccgcgcacgaagtgagtcacgatctggcgccgcagttccttgccgccggctgcgtggtgttcgatctctccggtgccttccgcgttaacgatggggcgttctacgaaaaatattatggtttcactcatcagcatcccgagctgctcaaacaggcggtgtatggtctggcggagtggagcgcggatgcgcttaaagaagcgcagttaatcgcggtgcctggctgctacccgacggcggcgcagctgtcgctgaagccactgatcgatgccggtctgctggatctcaaccagtggccagtgatcaacgccaccagcggggtgagcggcgcgggacgcaaagccgcgatcggcaacagcttctgtgaagtcagcctgcagccgtacggcatatttaaccatcgtcatcagccggagattgccagccacctcggggcaaaggtaatttttaccccgcacctgggtaattttaaacgcggtattctggaaaccattacctgccgcctgaagccgggcgttggccatgcgcagatcgcggcggtttaccagcaggcttacgccgataaaccgctggtacgtttatatgataaaggcgtgcccgcagtgaaaagcgtcgaaggtctgccattctgtgatatcggttttgccgtgcaggacgatcatctcatcgtcgtcgcggcagaagataacctgctgaaaggcgccgcagcgcaggcggtgcagtgcgcgaatattcgtttcggcttcgctgagacgcagtctcttatttaaggtgtgatgatgaacccattaattatcaaactcggcggcgtattactcgatagcgaagaagcgctggagcgtctgtttaccgcgctggtcaattaccgtgaagcgcaccagcgtccgctgattatcgtccacggcggcggctgcgtggtggatgagctgatgaagcagctcaatctgccggtgcagaagaaaaatggtctgcgggtgacgccggctgagcaaatcgacatcatcaccggcgcgctggcgggaaccgctaacaagacgctgctggcgtgggcgaaaaagcacggtctggcctctgtcggcctgttcctcggcgatggcgatagcgtgaaggtgacgcagctggatgctgagctgggccatgtcgggctggcgcagccgggctctccgacgctgatcaacaccctgctggcgggcggttacctgccggtggtgagctctatcggcgtgaccgatgagggccagctgatgaacgtcaatgctgaccaggcggcgacggcgctggcggctaccctgggggcggatctgatcctgttgtctgacgttagcggtatcctcgacggtaaagggcagcgcattgccgagatgaccgccgagaaagcggagcagctgatcgagcaggggattatcaccgacggcatgattgttaaagtgaatgcggcccttgacgccgcacgtgctctgggtcgtccggtggatatcgcctcctggcgtcacgccgagcagctgccggcgttatttaacggcacgccgatcggcacacgtattctggcttaagatttcatgcccggcggcgcgtcgtctgccgggcttacaagaccgtaggccgggcggcacaatgccgccggcggaactaacgaataaaggaagcatgttatggcactttggggcgggcgttttacacaggcagcagatcaacggttcaaacagttcaacgactcgttgcgcttcgactatcgtctggcggagcaggatatcgttggctctgtcgcctggtcgaaagcgctggtaacggtcggcgttctgagtgccgctgaacagcagcagctggaagaagcgctgaacgtgctgctggaagaggtgcgcgccaatccgcagcaaatcctcgccagcgatgccgaagatattcacagctgggtggaaggcaagctgatcgataaagtgggccagctgggcaagaaactgcacaccgggcgcagccgtaacgaccaggtcgccaccgatcttaaactgtggtgcaaagataccgttgtcgaactgctctcggcgaaccgccagctgcagagcgcgctggtggagaccgcccagcagaatcaggacgcggtaatgccggggtacacccacctgcagcgcgcccagccggtgaccttcgcgcactggtgtctggcctacgttgaaatgctggcgcgtgacgaaagccgtctgcaggacgcgctgaagcgcctcgacgtcagcccgctgggctgcggcgcgctggcggggacggcgtatgagatcgaccgcgagcagctggccggctggctgggctttgcctccgccacccgtaacagcctcgacagcgtgtccgatcgcgatcatgtgctggagctgctttccgatgcggctatcggtatggtgcatctgtcgcgctttgcggaagatctgattttctttaactccggcgaggcgaacttcgtcgagctttccgaccgcgtgacctccggctcctcgctgatgccgcagaagaaaaacccggacgccctggagcttatccgtggcaaatgcggccgcgtgcagggtgcgctgaccggcatgatgatgacgctgaaaggactgccgctggcctacaacaaagacatgcaggaagataaagaggggcttttcgacgccctggatacctggctcgactgcctgcatatggcggccctggtgctggacggcattcaggtaaaacgcccgcgctgtgcggaagcggcgcagcagggctatgccaacgccactgagctggcggattatctggtggcgaaaggcgtaccgttccgcgaggcgcaccatattgtcggtgaagcggtagtggaagccattgcgcaagggaaaccgctggaagcgctgaccctggccgatctgcagaaattcagcccggtgattgcggacgatgtgtatccgatcttgtcgctgcagtcctgcctcgagaaacgcgcagcgaaaggcggcgtctcgccgcagcaggtagcccaggctatcaacgaggcgaaggctcgtttaagctaatccttagatatctgccctccctgacccggccaagcccagcgacgccgggttttttatgcaaaaaaaagcggacgcaaggtccgcaaaagttcacgttggctttagttgttcgggtagagaaacagtgtgacgggtcagtgattttcacaggtagaccgtctttatgggcgtattattgaacagaaaacttgatagggataatcgttcgttgctatgctatctatcgccatggactatcgtggcgatggaggatgaataatgaatattcgcgatcttgaatacctggtagcgctcgccgaacaccgccacttccggcgggcggctgactcatgccatgtgagccaaccgacgctcagcggacagatccgcaagctggaggatgagcttggcgtcatgctgctggagcgcaccagccgtaaggttctgtttacccaggcggggctgttgctggtggatcaggcgcgtaccgtgttacgcgaagtaaaagtgctcaaggaaatggcaagccaacaaggggaaaccatgtccgggccgctgcatatcggcctgatcccgacaattggcccgtacctgctgccgcacatcattccgatgctgcatcagaccttcccgaagctggaaatgtatctgcacgaagcgcagacccatcagctgctggctcagctcgacagcggtaagctcgactgcgccatcctggcgctggtcaaagagagcgaggcctttatcgaggtgccgctgttcgatgagccgatgatgctggctatctatgaagatcatccgtgggcgaaccgcgatcgggtgccgatgtcggatctggccggtgaaaagctgctgatgctggaggatggccactgtctgcgcgatcaggcgatgggcttctgctttgaagcgggggcggatgaggatacccacttccgcgcgaccagcctggaaacgctgcgcaatatggtggcggcaggcagcggcattaccctgctgccggcgctggcggtgccgcaggagagaaaacgcgatggcgtagtctacctgccgtgcattaagccagagccaagacgcaccatcggtctggtttatcgtccaggctccccgctgcgcagccgctatgaacatctggcggaggccatccgcggcacgatggatggccatttcgacaaggcgttaaaacaggcggtttaagccgttcagcgcggcaacccggtacgcttccgccatggtcgggtagttaaaggtggtgttgacgaagtactcaatggtgttgccaccgcctttctgctccatgatcgcctggccgatatgaataatttcggccgcgcgctcgccaaagcagtgaatgccaaggatctccttggtttcacgatggaacaggatcttcagcgtaccaacgctcataccgacgatttgcgcccgcgccaggtgtttaaactgggcgcggcccacctcatacggcactttcatcgccgtcagctgctgctcggttttcccgacggagctgatttccggaatggtatagatcccggtcgggatatcttcaatcagatgcgctgaggcttcgcctttcaccagcgcctgggcggcaatgcgtccctgatcgtaagcggcagaagccaggcttggatagccgatgacatcgccaaccgcatagatgtgcgggagggcggtctgatacatgctgttgaccttcagctgaccgcggctgtcggtctgcagaccgatattttccagcgccagggtgtcggtgttgccggtgcggccgttagcgtacagcaggcaatcggccttcagctttttgccggacttcaggtgcatgatcaccccgtcatccaccccttcaattttctcatactcctcgttgtggcgaataaccacgccgctgttccagaagtgataagagagcgagtctgacatctcctgatcgaggaaggccagcagacgatcgcgggtgttgatcagatcgaccttcacctccatgccgcggaagatcgacgcatattcacaaccgatcaccccggcgccgtaaatgatcacatggcgcggctcatgctgcaggctgagaatcgaatcgctgtcatagatgcgcgggtggtggaaatcgacatccgccggatggtaggggcgcgatccgcaggcgataacgaatttctccgcggtcacagtctcgaccgtgccgtcatggcactccagcgccagagtatgctcatccacgaagtgggcattgccctgcagaatttcacagtggttgcgctcatagaatccctggcgcatatgagtctgctggttgatgacgctgtcggcatggttaaggatgtcggcgaaagaagagcgaagaaggcgggagtggtcgctgtagagggggttttggttaaactcgataatacggctgacggcatggcggagggctttcgacgggatggtgccccagtgggtgcaaccgccgccgacattatggtagcgctcgatgacggcaacgcgtgctccctgtttcaccagtcccatggcggcgccttccccgccaggaccggaaccaatcactattgcatcataatcccaagagtgtgacatggcattactcacctgttttatacataaaataaacacgatgataacattcgctgcgctttaacccaattatcgttgtgcttttttgcagcataaaagcagaaacggctcgtaaacaatcattcacaatccagggcaaaccgattagttttaatctctggtatagtgccagcagggctattggaaggattcatacatcgtgatgggcgtaagagcacaacaaaaagaaaaaacccgccgttcgctggtggaagcggcattcagtcaacttagcgctgagcggagtttcgccagcctgagcttgcgtgaagtggcccgggaagcagggatcgcgccgacgtccttttatcgtcattttcgcgacgtcgatgagctgggcctgacgatggtcgatgagagcggactgatgctgcgccagctgatgcgccaggcgcgccagcggatagccaaaggcggcagcgtgatccgcacctcggtctccacctttatggaatttatcggtaacaacccgaacgccttccgcctgctgctgcgcgagcgctcgggaacttctgcggcgtttcgcgccgccgtcgcacgcgagatccagcactttattgcggaactcgccgactatttagaactcgaaaaccatatgccgcgcgcctttaccgaagcgcaggctgaagctatggtcaccatcgtttttagcgctggcgcggaagcgctggatgtcggccctgagcagcgccggcagctggaggaacggttggtactgcagcttcgaatgatctcgaaaggcgcgtattactggtatcgccgtgaacaagaaaaaatgtcacatcattccgaataacgtgaaggacgagcaatgaaacactcagttcaagataaaggtacgctgctgctggcgctgattgccgggttatccattaatggcgcctttgcggcgctgttcagttcgatagttccgttttccgtcttccccattttatccctgctgctgacggtctactgtctgcatcagcgctatcagaatcgcagtatgcccgttgggctaccgggcctggccgccgccttttttattctcggggtgctgttgtacagcaccgtcgtgcgtgcggagtacccggatatcggttctaacttcttcccggccgttctgtccgtcgcgatggtcttctggatcggctacaagatgcgtaaccgcaaagataccgcagccgagtaagccgccagtggtaaaaaaaccggcaatatgacgttgccggtttttttgggcctatttgcgggtcagcaggacgccgcactccatgtgatgggtatacgggaactggtcgaacagcgccagccgggtaacgttgtgcgtctggcttagcgtttccagattgcgacacagcgtttccgggttgcacgaaatgtacaaaatacgcggataggcctgcaccattttttccgtctcgctgtccagcccgctgcgcggtggatcgacgaagatggtttcgcactgatagctatgcagatcgataccctgcagccggttgaactgccgcaccccgttcatcgcctgagtaaactcttccgccgccatgcggataatctgcacgttgtcgatatggttagcggcgatgttgtactgcgccgccgccaccgacggtttggcgatttcggtggccaatacgcgatcgaaattacgtgccagcgccagcgagaagttaccgttgccgcagtacaattccagcaggtcgccagtcgcccctttggtgacatccagtgcccactccagcatctgaatgttcatggccgcgttcggttgggtaaagctgttttccacctgacggtagatcatctcccgcccgccaaccggcaggcgttcatctatatagtcttgatcgagctcgattttggttttggtcgcccgcccaatcagatgcacattgagcccctgggctcgcagggcgtcacgcagcgcctccgcttgctcacgccaggcatcgtccagctttttatgatacagcagcgacacgaccgcctggttgctgagggtggtcagatagtcaatctggaacagcttctggcgtagcacgggattgttgcgtacgccctccaacatggcggtcatcagctgattgatcagcgcgctggcggccgggaagctgtcaacgcgaatccgcgaccgggtctgctgatcgaaaataatatggtacagatcgtcgccatcgtgccacagacggaactcggcgcgcatgcggtagtggctgaccggcgaacgaaacacttccggaaccggcgcggcaaaaggcgccatcatggtttgcaaacggacgactttttctgccagctgcgcttcgtattgttcggtaggaaggtgttcgggggtcatgatgcatcctgaataaaataagtacgcggggattgtagggaaagcgccggggatgtccagcctcgaatgtggcgggaaatataattagcagtctggacatctatatgagtctaattgtagcattcgcctaccggtcctgtgagttaaaagggaacccagtggaaatctggggctgacgcgcagcggtaaggaaggtgagaaatgagcgcactcggtgcagacactgcggctagccgtgggaagtcattatttcttgaaacagcctccaagcccgaagacctgccggaatacgtcgcactgggttttatcgtcgcgagcaaatgataaaacctgcggcatcctttttctgtttcggatgcttttacaatgattaaaaaagcttcgctgatgacggccttatccgtcacggcattttccggctgggcgcaggatagcaattcagatacgttagtggtgacagcaaaccgttttcaacaaccggtcaataccgtgctggcgccgaccgacattgtgacgcgcgatgatatcgaccgctggcagtccaaagatttaaacgatgtgatgcgtcgtcttcccggggttgatatttcccgcaacggcggcatggggcagagtgcttcgctgtatgtccgggggacggaggctcgccacgtgctggtgctgatcgacggtgtgccgatggcgcgtcctgggatctccaacggcgtagatatcagtcagatccctatctcactggtccagcgggtggaatacatccgcggcccgcgctccgcggtgtacggctccggagcgatcggcggggtggtgaacatcatcaccatgaccgacgctgagcgttcgcagatcaacgccggcgcgggtacgaacggctatcagtcctatgacggcgcctttaacaagcggtttggcgatacgttggttaccgctgctggcgcctatcagaccaccaaagggtttaacgtccagccgaattcctcttacagcggcgacagcgatcgcgacggctaccgcaataaaatgctgtggggcggggtacagcatcagttcgatgacaacttctcggggttcttccgcggctatggttattccgccaacgctgactatgaccagggtaactggggctacgcaggtggaaacgatgaagatcaatcctatacccaatcctgggataccggtctgcactaccactccggaatttactcctcccagctgattgctaactatcagcgcatcaaagattacaactacagcagcgacgctggccgctatgccgcgggcaccaccctggatgatatggaacagcgctatatccagtggggaaataatgttgtggtaggccatggggcagtgagcggcggcgttgactggaaacaagagaagctgaaatccagcggaacgaccagtaccgacgtgtataagcgtgacaccaccggtctttatctgacgggacagcagcagattgacagcgtgacgctggaagcttccggccgtgaggatcatgacgagcagtttggctggcacggtacctggcagacggccgcaggctgggaatttatcgacggttatcggacaacgctctcgtacggcacaggattcctcgccccctccctcgggcagcagtacggcgcagaacgctttggcatcgcctctaacccgaatctgaagccagaggagtcgaagcaatgggaagcgggccttgaagggttaacggggccggtcgactggcgcctctccgcgtatcgctatgagattcaaaacctcatcgattacgacaacaacgcctattacaacgtcaagtcggcaacgattaaggggctcgagtggacggggaatataaccaccgggccggtggagcaccatctgacgctgcagtatgttgaccctcgcgatgatgaaaccaataagatcctctatcgccgggcgaagcagcaggtgaaatacgagctgaacggccaggtctacgatctggggtgggatgtgacgtatcactacatcggcaagcgttacgattatgactacgacaactcgcgtaccgtcaatatgggtgggttgagcctctgggatgtcggtttatcgtatcccgtcacctcacacctgacagttcgtggtaaaatagccaacctgttcgataaagattacgagacagtttatggctaccaatctgcaggacgggaatacaccttgtctggcagctacaccttctgatccacgtcccaccgtgctggtgtttgattccggcgtcggtgggttgtcggtttataatgagattcggcagctgctgccgaatctgcattacatctatgctttcgataacgttgccttcccctatggcgagaagagcgaggagtttatcgttgagcgcgttgtggaaatcgtcaccgctgtccagcagcgttatcccctggcgctggcggtgatcgcctgcaataccgccagtaccgtctccctgcctgccctgcgtgaaaagttcgctttccccgtcgttggcgtggtgccggcgatcaagcccgccgcccgtttaacggcgaacggcattgttggcctgctggcgacgcgcggtaccgtaaagcgtccttatacccgtgagctgatcgaccgctttgccaatgaatgtcggattgaaatgctggggtcggcggagctggtggagctggcggaagcgaagctgcacggcgagcctgtgccgttagaagagctgcgccgtatcctgcgcccgtggctgcggatgcaggagccgccggatacggtggtgctgggctgcacccattttcctcttttacaggaggagctgcagcgcgttctgccggaaggcacgcggctgatcgattctggcgcggcgattgcccgtcgcaccgcctggctgttagagcatgaagcgccggatgcgaagtccagcgacgagaataaagcattctgcatggcgctgacggcagaaacagaacagcttttacccgttctgcgtcgctatggcttctcgacgctggaaaaattaccgctctaagggcgttttgcacaaaaaagagacggttgaataattttttgaaaacagggcttgtcaacgtctcagaactccctataatgcgcctccactgacacggaacaacggcaagcaagccgccgggtcagcaggattttagcggtgaagttcagcgctaaaaactgacagagaaaagcaaaataagggcttgactctgaatgaggaaaacgtattatacgggacctcgcaacggtgagctgaaagccgcgttgcaactgctctttaacaatttatcagacaatctgtgtgggcactcaaagtgacatggattcttaacgtcctcggacgaaaaatgaataccaagtctcaagagtgaacacgtaattcattacgaagtttaattctttgagcatcaaacttaaattgaagagtttgatcatggctcagattgaacgctggcggcaggcctaacacatgcaagtcgagcggtagcacagagagcttgctctcgggtgacgagcggcggacgggtgagtaatgtctgggaaactgcctgatggagggggataactactggaaacggtagctaataccgcataatgtcgcaagaccaaagtgggggaccttcgggcctcatgccatcagatgtgcccagatgggattagctagtaggtggggtaacggctcacctaggcgacgatccctagctggtctgagaggatgaccagccacactggaactgagacacggtccagactcctacgggaggcagcagtggggaatattgcacaatgggcgcaagcctgatgcagccatgccgcgtgtgtgaagaaggccttcgggttgtaaagcactttcagcggggaggaaggcgttaaggttaataaccttggcgattgacgttacccgcagaagaagcaccggctaactccgtgccagcagccgcggtaatacggagggtgcaagcgttaatcggaattactgggcgtaaagcgcacgcaggcggtctgtcaagtcggatgtgaaatccccgggctcaacctgggaactgcattcgaaactggcaggctagagtcttgtagaggggggtagaattccaggtgtagcggtgaaatgcgtagagatctggaggaataccggtggcgaaggcggccccctggacaaagactgacgctcaggtgcgaaagcgtggggagcaaacaggattagataccctggtagtccacgccgtaaacgatgtcgatttggaggttgtgcccttgaggcgtggcttccggagctaacgcgttaaatcgaccgcctggggagtacggccgcaaggttaaaactcaaatgaattgacgggggcccgcacaagcggtggagcatgtggtttaattcgatgcaacgcgaagaaccttacctggtcttgacatccacagaactttccagagatggattggtgccttcgggaactgtgagacaggtgctgcatggctgtcgtcagctcgtgttgtgaaatgttgggttaagtcccgcaacgagcgcaacccttatcctttgttgccagcggttcggccgggaactcaaaggagactgccagtgataaactggaggaaggtggggatgacgtcaagtcatcatggcccttacgaccagggctacacacgtgctacaatggcatatacaaagagaagcgacctcgcgagagcaagcggacctcataaagtatgtcgtagtccggattggagtctgcaactcgactccatgaagtcggaatcgctagtaatcgtagatcagaatgctacggtgaatacgttcccgggccttgtacacaccgcccgtcacaccatgggagtgggttgcaaaagaagtaggtagcttaaccttcgggagggcgcttaccactttgtgattcatgactggggtgaagtcgtaacaaggtaaccgtaggggaacctgcggttggatcacctccttaccttaaagaacctgcctttgcagtgctcacacagattgtctgatgaaaaacagcagtaaaaacctctacaggcttgtagctcaggtggttagagcgcacccctgataagggtgaggtcggtggttcaagtccactcaggcctaccaaatttgcgaagcaaatttgaagaggttgcaaacgatggggctatagctcagctgggagagcgcctgctttgcacgcaggaggtctgcggttcgatcccgcatagctccaccatctttactgcgaacacaagaaaacttcagagtgaacctgaaaaggtgcactgcgaagttttgctctttaaaaatctggatcaagctgaaaattgaaacgacacacagttaatgtgtgttcgagtctctcaaattttcgcaatcagaagtgaaacatcttcgggttgtgaggttaagcgactaagcgtacacggtggatgccctggcagtcagaggcgatgaaggacgtgctaatctgcgaaaagcgtcggtaaggtgatatgaaccgttacagccggcgatgtccgaatggggaaacccagtgcaattcgttgcactatcgttaactgaatacataggttaacgaggcgaaccgggggaactgaaacatctaagtaccccgaggaaaagaaatcaaccgagattccccagtagcggcgagcgaacggggagcagcccagagtctgaatcagcttgtgtgttagtggaacggtctggaaagtccgacggtacagggtgatagtcccgtacaccaaaatgcacaggttgtgaactcgaagagtagggcgggacacgtggtatcctgtctgaatatggggggaccatcctccaaggctaaatactcctgactgaccgatagtgaaccagtaccgtgagggaaaggcgaaaagaaccccggcgaggggagtgaaaaagaacctgaaaccgtgtacgtacaagcagtgggagcaccttcgggtgtgactgcgtaccttttgtataatgggtcagcgacttatattctgtagcaaggttaaccgtataggggagccgcagggaaaccgagtcttaactgggcgttaagttgcagggtatagacccgaaacccggtgatctagccatgggcaggttgaaggttgggtaacactaactggaggaccgaaccgactaatgttgaaaaattagcggatgacttgtggctgggggtgaaaggccaatcaaaccgggagatagctggttctccccgaaagctatttaggtagcgcctcgtgaactcatcttcgggggtagagcactgtttcggctagggggtcatcccgacttaccaacccgatgcaaactacgaataccgaagaatgttatcacgggagacacacggcgggtgctaacgtccgtcgtgaagagggaaacaacccagaccgccagctaaggtcccaaagtcatggttaagtgggaaacgatgtgggaaggcacagacagccaggatgttggcttagaagcagccatcatttaaagaaagcgtaatagctcactggtcgagtcggcctgcgcggaagatgtaacggggctaaaccatgcaccgaagctgcggcagcgacactatgtgttgttgggtaggggagcgttctgtaagcctgcgaaggtgtgctgtgaggcatgctggaggtatcagaagtgcgaatgctgacataagtaacgataaagcgggtgaaaagcccgctcgccggaagaccaagggttcctgtccaacgttaatcggggcagggtgagtcgacccctaaggcgaggccgaaaggcgtagtcgatgggaaacaggttaatattcctgtacttggtgttactgcgaaggggggacggagaaggctatgttagccgggcgacggttgtcccggtttaagcatgtaggctggttatccaggcaaatccggataaccaaggctgaggtgtgatgacgaggcactacggtgctgaagtaacaaatgccctgcttccaggaaaagcctctaagcatcaggtaacatcaaatcgtaccccaaaccgacacaggtggtcaggtagagaataccaaggcgcttgagagaactcgggtgaaggaactaggcaaaatggtgccgtaacttcgggagaaggcacgctggtgtgtaggtgaagtccctgcggatggagctgagaccagtcgaagataccagctggctgcaactgtttattaaaaacacagcactgtgcaaacacgaaagtggacgtatacggtgtgacgcctgcccggtgccggaaggttaattgatggggttatccgtaaggagaagctcttgatcgaagccccggtaaacggcggccgtaactataacggtcctaaggtagcgaaattccttgtcgggtaagttccgacctgcacgaatggcgtaatgatggccaggctgtctccacccgagactcagtgaaattgaactcgctgtgaagatgcagtgtacccgcggcaagacggaaagaccccgtgaacctttactatagcttgacactgaacattgagccttgatgtgtaggataggtgggaggctttgaagcgtggacgccagtctgcgtggagccaaccttgaaataccaccctttaatgtttgatgttctaacgttggcccctgaccggggttgcggacagtgtctggtgggtagtttgactggggcggtctcctcccaaagcgtaacggaggagcacgaaggttagctaatcctggtcggacatcaggaggttagtgcaatggcataagctagcttgactgcgagcgtgacggcgcgagcaggtgcgaaagcaggtcatagtgatccggtggttctgaatggaagggccatcgctcaacggataaaaggtactccggggataacaggctgataccgcccaagagttcatatcgacggcggtgtttggcacctcgatgtcggctcatcacatcctggggctgaagtaggtcccaagggtatggctgttcgccatttaaagtggtacgcgagctgggtttagaacgtcgtgagacagttcggtccctatctgccgtgggcgctggagaattgaggggggctgctcctagtacgagaggaccggagtggacgcatcactggtgttcgggttgtcatgccaatggcactgcccggtagctaaatgcggaagagataagtgctgaaagcatctaagcacgaaacttgccccgagatgagttctccctgagactataagtctcctgaaggaacgttgaagacgacgacgttgataggccgggtgtgtaagcgcagcgatgcgttgagctaaccggtactaatgaaccgtgaggcttaaccttacaacgccgaagatgttttggcggatttgagagaattttcagctctgatacagattaatcgatacgtcggtgagacgtgttgataaaacagaatttgcctggcggcactagcgcggtggtcccacctgaccccatgccgaactcagaagtgaaacgccgtagcgccgatggtagtgtggggtctccccatgtgagagtagggaactgccaggcatcaaattgcagtaagccggggtgacaactggtggtaataaagcgaagaaattcggtggagcggtagttcagtcggttagaatacctgcctgtcacgcagggggtcgcgggttcgagtcccgtccgttccgccacttatttaacattaagcctgctcaaatagcaggcttagtggtaagaaaattttaggggcgtagttcaattggtagagcaccggtctccaaaaccgggtgttgggagttcgagtctctccgcccctgccatttataagaatcctttgctcaggcaaaggatttttttttatctctaatctccattggcaatatccccgacgaaaataccttgctgatctccgtccatggagagtagcgtttattccagaatagggtttttcaggatctcatggatctgcgcctgcttatcgctattttgtaaccagatcgcataaagtggacgggataacgtagcgctgtccatgaccgtatgtaacccatgcttctctttcgcccagcgagcaggtagccaacagcagccgttcaggcgcgataattgctgatagatcagttcagctgaagaggtagtgagcagcggaacatcatcgcttcctatcagtcccacttcgttttgctgaaaatcaggcccccattcaaggcgcaagtaattcaattcatttctgttttttgcaggcgatgcgcaatacagggcaagagtaaaattacccaacagctggctgcttaattcatccatcttcggcgattcggtggtgatcagcagatccaactggcgttcgtgaagctgtttaaccaacgactgccgctgcgcgatacgggcttcaaactggagattgtaaggtgcgctgtagagggtaccgagccagctgttaagcatacattcccacagggaggcgctggccccaatggagaattcattgtgtcgcgaagagtgtgccacctccttgcgcgcagcctgccaggtattcatgagcgtttcggcataggggaggagcttttcgccggcagtcgtcaggcggatgttattacgatgacgggtgaacagattcacaccaagttgattttccagctgacgaatacgaaagctgactgctgactgtgtcaggtaaagcgcctctgctgctcgcccaaagtgacgagttctactcacttccaggaaagtcttgagcaattccgtatccacaccgttctccacaaaattatttgtcgtgatgatttaaatgttttgtttgacgctctgtcaagcgtaactaatactccgcgccataaatagctcggccaaagaatcaggagcgtgtaggatggcggaaagctttacgacgactaatcgttttttcgacaataaaaattatccacgcgggttctcccgtcacggtgatttcaccatcaaagaggcgcaactgctggaacgtcatggttatgcctttaacgaactggaactgggtaagcgcgaacctgttaccgaagatgaaaaacaatttgtctcggtgtgccgtggtgaacgtgagccggtgacggaagcagaacgcgtatggattaagtatatggcgcgtatcaagcggccgaagcgtttccatactctgtccggcggcaaaccgcagatggaaggcgctgacgattacaccgaaagcgatgactaagaaaaaagggcgtaagccctttttttacgccatcattttctgcagatggttgagcatccgatctattgcccgatagctgagcgcctcctgcaaatgacagcgttcaatctcttcaacctctgccagatcggcaatggttctcgcaacctttaacagacgctgccaggcgcgaatagaaagccccagctgcgttagcgtctgttccagccagacagcatcctcccgccttaagcgacagcagttcttcatttcacgattctcaagatgggcattgagtttattttgcctgagcatttgtcgttcacgcgccgccagcacccgctgccggaccgttgcgctcgattcttcgccctgcgagccctgactcagtattcctggcggcggcaatgggatctctaaggaaagatcgaagcggtcgaggaaggggcctgacaggcgtccaaggtagcgcaatgtctgctccggcgatgcacgattatgtttaccctgataatgtcctgtcgggcttggattcatcgctgcaataagctgaaagcgcgccggatagtcaattttggcgcgcgagcgtgatatgtggatcttgcctgactcaataggttcgcgtagcgcatccagtacccgccgctcaaactccggcagttcatcaagaaacagcacgccattatgggccagggaaatctcaccggggaccggtatcgagccgccgcccaccatcgctgccagcgaggcgctatggtggggggcgcggaacggcctctgacgccaccgcgtctttgcggtgtggaggttgaccagactctgtatggccgcgctctccagcgcttcctgattgcttaatggcggcaggagaccggggagtcggctggctagcatggttttcccggtcccgggcgggcctatcaggagcaggttgtgaccaccggcggccacaatctccagcgctcgtttgccctgctgctggccgataacatcgagcagatcttcgtagcgttcatcccgagcaggcgcctcggcgagaggcggcgaaagcgatgtctgccccgcaagaaatgcgcaaacctcttgcagatggtcggcgaccagacaatcgctgccgccgatcaggccgacctccgccgcattgtcagaggagacgacaatgcgccggccggctttgatggcctccattgcgctggggatcgcccctggaacgcctcgtaacccacctgtaagggcgagttcgcccacaaactcatattgattcagtcgcgtcgtgttgagctgctctgaggcaacgagaagcgcgagagcgatgggcagatcgtatcgtccgccttctttgggcagatccgctggcgccaggttaatggttatcttcttcgcaggaaaagcgtagccgctgttgatcagggcgctgcggactcggtcgcgggcctctttcacggtggtttccggcagcccgaccatagttagaccaggaagaccgttgctgagatgaacctcaacggtaatcaatggcgcttcgataccgagcgccgcgcgagtatagacgatagcgagcgacataaaacctcctggacagagaagaattatggttggcatgacgtaaagcgagaatggaaaaagtgcgaatttagaactgcgtatccatacttttcgcggcacatcgttacatttagccgaaaatggacgtttgatcgcaaaacagagctatgttggcaaagagggcgccgaagagcgcggcaggggtgagaaaactgaatttttttcatttttgatttttttcatataaaacaattatttttattgaaaccgttaggctgatcagcaacgaagatataaaaaaatcttgtgctttatgtgatgtctgtggtaactctttaggtattccttcgaacaagaagccagaaagtatagaaaatgacagcccttctacgagtgattagcctggtcgtgattagcgtggtggtgattattatcccaccgtgcggggctgcacttggacgaggaaaggcttagaaatcaagccttaacgaactaagacccccgcaccgaaaggtccgggggtttttttataactgaaataacctaagcgaggagcagatgatgacttttagcataaaattctgtttctcccgatttatgacggggaactaactatgaatggcgcgcagtgggtggtacatgctttgcggacacagggagtcgacacagtttttggctatccgggtggcgcaattatgccggtttacgatgcactgtatgacggcggcgtggagcacctgctgtgccggcatgagcaaggggcagccatggcggccattggttatgcgcgagcaaccggtaaaaccggggtgtgtatcgcgacgtccggcccgggcgcgaccaatctgatcaccggcctggcggacgccctgcttgactctattcccatcgtagctatcaccggccaggtggccgcacccttcatcggcacggatgcgttccaggaagtagatgttctcggtttgtcactggcctgtactaagcacagtttccttgtgcagtctctggacgaactgccgcgggttattgccgaggctttccaggtggcaaactcaggccgtccaggtccggtgctggttgatatccctaaggatattcagatggcgcagggcgacctcgatccccatttctctaccgtcgccgatgagatggcatttccgcaggcggaagtggcgcaggctctgcagatgctggcccaatcgcagcaaccgatgctgtatgttggcggcggggtcggcatggcgcaggcggtaccggctttgcgcgaattcctggcggtgaccaggatgccggcaacctgcaccctgaaagggctgggcgtggtggatgctgattatccctattatctcggcatgctgggaatgcacggcactaaggcggccaacctggcggtacaggagtgcgatctgctgatcgccgtcggcgcgcgctttgacgatcgcgtaaccggtaagctcaataccttcgcaccgcatgccaaagtgatccacatggacatcgatccggcggagctgaacaagctgcgtcaggcgcatatcggtctgacaggcgatctgaactgcctgctgccggcgctgcagcagccgttagctatcgatggctggcgcgagcggagtgccgcactgcgtgccgagcatgcctggcgttacgatcatcccggtgaggcaatctacgcgccgctgctgctgaagcagctttccgaccgcaagccggcggacagcgtggtgaccaccgacgttggccagcaccagatgtggtcggctcagcatatgacctatacccgcccggaaaactttatcacctccagtggcttaggcaccatgggctttggcctgccggccgccgttggcgcccaggtggcgcgccctaacgatacggtgatctgtatctccggtgacggctccttcatgatgaatgtacaggagctgggcaccgttaaacgcaagcagttaccgctgaagatcgtgttactcgacaaccagcggttagggatggttcgacaatggcagcagctgtttttccaggaacgttatagcgaaaccactctgactgataaccctgatttcctcacgctggccagcgccttcggtattcctggccaacacatcacccgtaaagaccaggttgaagcggcactcgacaccatgctttcgagccaggggccatacctgcttcatgtctcaatcgacgaacttgagaatgtctggccgttggtgccgcccggcgccagtaactctgaaatgctggagaaattatcatgatgcaacatcaggtcgctttacaggcacgtttcaacccggaaaccttagagcgcgtgctgcgcgttgtccgccaccggggtttccacatctgcgcaatgaacatggaaaccgcgccggacgcacagaacataaatatcgaattgaccgttgccagcccgcggcccgtcgaattactgtttagtcaattaagcaaactggtcgacgttgcctgcgtcgagatccagcaacccacatcacaacaaatccgcgcctgagcgcaaaggaagaaaaatgacgacgaaaaaagctgattacatttggttcaatggcgagatggttccgtggggcgaagcgaaagttcatgtgatgtcccatgcgctgcactacggtacctcggtattcgaggggatccgttgctacgactcgcacaaaggcccggtggtgttccgtcatcgcgaacatatgcagcgtctgcatgattcagccaaaatttatcgtttcccggtctcccagagcgtcgacgaactgatggaagcctgccgcgaagtcattcgaaccaataatctgaccagcgcttatatccgtccgctggtgtttgttggcgatgtcggcatgggggtaaacccgcctccgggttacaacactgacgtgatcatcgcggcgttcccatggggagcctacctcggcgcagaagcgcttgagcaggggatcgatgcaatggtctcttcctggaaccgcgcggcgccgaacactatcccgacggcagcgaaagccggtggtaattatctttcctcgctgctggttggcagtgaagcgcgtcgccatggctatcaggaaggtatcgccctcgatgttaacggctatatctccgaaggcgcaggggaaaacctgtttgaagtgaaggacggtgtactgttcaccccgccgtttacctcttccgcgctgccgggcattacccgcgacgccattatcaagctggcgaaagatcttggtatcgaagtccgcgagcaggtgttgtcccgtgaatccctgtatctggcggatgaagtcttcatgtccggcactgcggcggaaatcaccccggtacgcagcgtggacggcatccaggtcggcgcaggccgtcgcggtccggtaaccaaacgcattcaggaagccttctttggcctcttcaccggtgaaacagaagataaatggggctggttggatccggtaagtaagtaattaaaaatgggacggcacgcaccgtcccatttaataaacacagatgggagtaaaaagagcatgcctaagtaccgttccgccaccaccacacatggccgcaatatggcgggcgcccgcgcgttgtggcgcgcaaccggaatgaccgatgccgatttcggcaaaccgattatcgccgtcgttaactcctttacccagtttgtccccgggcacgtgcacctgcgcgatctcggcaaactggttgccgagcagattgaagccgccggtggcgtggccaaagaattcaacaccatcgcagtggatgatgggatcgctatgggccacgggggtatgctctattcactgccatcccgcgagctgatcgccgactcggtggagtatatggttaacgcccactgcgctgatgccatggtttgtatctccaactgcgacaaaatcaccccggggatgctgatggcctccctgcgtttgaatattccggtgatctttgtttccggcggcccgatggaagccgggaagaccaagctgtcagataaaatcatcaagcttgacctggtggatgcgatgattcagggggcggatccgaaagtgtccgacgagcagagtaatcaggtggaacgctccgcctgcccgacctgcggctcctgttccgggatgttcacggcgaactccatgaactgcctgaccgaagcgctgggcctgtcacaaccgggcaacggctctctgctggcgacccacgccgatcgtaaggagctgttcctaaacgccgggaaacgtatcgtggagctgaccaaacgctattacgagcaggatgacgcttccgcgctgccgcgcaatatcgccagcaaggcggcctttgagaacgctatgacgctggatatcgccatgggcggctccaccaataccgttctgcacctgctggcggcggcgcaggaagctgaaatcgacttcaccatgagcgatatcgataagctctcccgcaaagtgccgcagctgtgtaaggtggcgccgagcacgcagaaataccatatggaagatgtgcatcgcgccggcggcgtgctgggcattctgggcgagctggaccgcgccgggctgctgaatcgcgaggtcaaaaacgtccttggcctgacgctgccgcagaccctggaacagtacgatgtgatggtgacccaggacgacgcggtgaaaaaaatgttccgcgccggcccggcgggcattcgtaccacccaggcgttctcgcaagactgccgctgggataccctggatgacgatcgcgccgaaggctgtatccgttctctggaacacgcttacagcaaggacggcggcctggcggtgctgtacggcaatttcgcggaaaacggttgtatcgtgaaaaccgccggcgtggacgacagcatcctgaaatttaccggtccggcgaaagtatatgagagccaggacgatgcagttgaggctatcctcggcggtaaagtcgtggaaggcgacgtcgtggtgatccgctacgaagggccgaaaggcgggccggggatgcaggaaatgctttaccccaccagcttcctgaagtcgatggggctgggcaaagcgtgcgcgctgatcaccgatggccgtttctccggcggcacctcagggctctctatcggccacgtctctccggaagcggcgagcggcggcaacattgcgctcattgaagatggcgacatgatcgcgattgatattccgaaccgcagcatccagctgcagctgagcgatgcggaaattgcggcgcgtcgtgaagcccaggaagcgcgtggcgaccaggcgtggacgccgaagaatcgccagcgtcaggtctcctttgctcttcgcgcctacgccagcctggcgaccagcgccgacaaaggcgcggtacgcgataaatccaagctgggtggctaatcatggcggattcacaacccttgtccggcgcccctgagggcgccgagtacctgagagcagtgctgcgcgcgccggtttatgaagcggtgcagaaaacgccgctgcaaaaaatggataagctctcgtcgcggctggataacgttattctggtgaagcgtgaagatcgccagccggtacacagctttaagctgcgtggcgcttacgcgatgatgtccagcctgactgccgaacagaaatcccacggggtgatcaccgcttcggcgggcaaccatgcccagggcgtggcgttttccgcatcgcggctgggcgttaaggcgctgatcgtgatgccggtagcgaccgccgatatcaaagtcgatgccgttcgcggctttggcggcgaagtgctgctgcacggcgccaactttgacgaagcgaaggcgagagcgattgagctggcgcaacagcagggttttacctgggtgccgccgttcgatcacccaatggtcatcgccggacagggaaccctggcgctggagctgctgcagcaggatgcccatattgaccgcgtattcgtcccggtgggcggcggcggtctggcagcgggcgtggcggtgctgatcaagcaactgatgccgcagatcaaagtgatcgcggtggaggcggaagattctgcttgcctgaaggcggcgctggacgcaggccatccggtggatctgccgcgcgtcggcttgtttgccgaaggcgtggcggtcaaacgcatcggcgatgaaacgttccgtttatgccaggagtatctggacgatatcatcaccgtcgatagcgatgctatctgcgcggcgatgaaggatctgttcgaagatgtgcgggcggtggcggagccttccggcgcgctggcgctggcggggatgaaaaagtatatcgcccagcataacatccgcggcgagcgtctggctcatattctgtccggggccaacgtcaacttccatggcctgcgctacgtgtccgagcgctgcgagctcggggaacagcgggaagcgctgctggcggtgacgatcccggaagagaaaggtagctttttgaagttttgccagctactggggggccgctcagtgacggagttcaactaccgctttgccgatgccaaagacgcctgtatttttgtcggggtacgcctgagtcgtggcctggaagagcggaaagagatcctccagttactgaacgacggcggctacagcgtggtggatctctctgatgatgagatggctaagctgcatgtgcgctatatggtcggcggccggccgtcaaaagcgctgcaggagcggctgttcagcttcgagtttccggaatcgccgggggcgctgctgaaattcctgcatacccttggcacccactggaatatttcactgttccactaccgcagccacggcactgactatggtcgggtactggcggccttcgagttgggcgagcacgagccggactttgaaactcgtctcaatgagctgggctatgagtgccacgacgaaacgcataacccggcattccgctttttcctcgcgggttagtggttgggaagaattttccagaaagcatcaataagcggctcatgcagccgctttttttgtgcgcaaacgcccagctcaaacggcgtttgctcatcgctgcgctccaggatcatcaccctgttgcgtaccggttccggactgttctccagcaccacttccggcagcagcgccacgccgcatcccagggcgaccatcgacaccatcgcttcgtgcccgccgacggtggcgtagatcgacggattgctgattttatgccgccgaaaccacagctcgatgcgccgacgtaccggcccctggtcggccatgataaagggcactgtcgaccagtcggggcgctcgacggtcacctggttgcgcaccgggcagggaagggccggggcaattaacaccacggcgaggttctccagcatcgaaaacgccaccgaccctggcagagtctccggcttaccggcaatcgccaggtcggcttcgccggtgacgaccttctccatagcgtcggcggcgtcgccggtcgagagcttgatctccaccgaggggtgcgcggcgcgaaagcggtcgagaatcggcggcagatggctataggcggcggtgacagagcagaagatgtgcagctcgccggagagcgaagggccctgctgatcgatgacgtgacgaagctgctgatactgcaataaagtctgttgggcaaaggtacgtaactcttccccggcttcggtaagggtcaccgtgcgattatctcgcacgaacagcggctggccgaggtcctcttccagacgctggatctggcgcgaaagcgtcgacgggctgacgtgcatggcccgcgcgctgcggccaaaatggcggctttccgccagatgcagaaaggttttcagatcgcgtaaatccacggcgcgtactccccggttttgtatttcataaaatgcaacgtgacgttgtgaatatatcaatttccgcaataaaattcctgtcatatagtaagttcattctcgcaaaagcgaaccgaacaataagcacgacacaacatcacggagttacagacatggctaactactttaatacactgaacctgcgccagcagctggcacagctgggcaaatgccgctttatggcgcgcgacgaattcgccgatggcgcaagctaccttcagggtaaaaaagtggtcatcgtcggctgcggcgcacagggcctgaaccagggtctgaacatgcgtgactccggcctggatatctcctatgcgctgcgtaaagaagcgatcgctgagaagcgcgcctcctggcgtaaagcgactgaaaacggcttcaaagtcggcacttatgaagagctgatcccgcaggccgacctggtggttaacctgacgccggacaaacagcactcagacgttgtgcgctccgtacagccgctgatgaaagacggcgcagcgctgggttactcccacggcttcaacatcgtggaagtgggcgagcagatccgtaaagacatcaccgtggtgatggtggcgccgaagtgcccgggcaccgaagtgcgtgaagagtacaaacgcggtttcggcgtaccgacgcttatcgcggtacacccggaaaacgacccgaaaggcgaaggcatggcgattgccaaagcatgggctgcggcgacaggcggccaccgcgcgggcgtgctggagtcttccttcgtggcggaagtgaaatctgacctgatgggcgagcaaaccatcctttgcggcatgctgcaggcgggttctctgctgtgcttcgacaagctggtggcggaaggtaccgatccggcgtatgcagaaaaactgattcagttcggctgggaaaccatcaccgaagcgctgaagcagggcggcatcaccctgatgatggatcgcctctccaacccggcgaaactgcgcgcttatgcgctgtccgagcagctgaaagagatcatggcgccgctgttccagaaacacatggacgacatcatctccggcgaattctcctccggtatgatggcggactgggcgaatgatgataagaaactgctgacctggcgtgaagagaccggcaaaaccgccttcgaaaccgcgccgcaatatgaaggcaaaatcggcgagcaggagtacttcgataaaggcgttctgatgatcgcgatggtgaaagcgggcgttgagctggccttcgaaaccatggtggcctccggcatcatcgaagagtctgcttactacgaatcactgcatgagctgccgcttatcgccaacaccatcgcccgtaagcgtctgtatgagatgaacgtggttatttccgataccgctgaatatggtaactacctgttctcttacgcttgcgtaccgctgctgaaagagttcatgaccaccctgcagaccggcgacctgggcacagcgattgccgaaggcgcggtagataacgcgcagctgcgcgatgtgaacgaagcgattcgcagccacgctatcgagcaggttggtaagaaactgcgcggttatatgaccgatatgaagcgtatcgcggtagccggctaattcctcgtcgtctttcgacttgccgatgcgttggctacggtacgtacaccccagtcacatagtaatctttgttcctggggatgtacttccttgccgccttccggcaagccgaaatccatagaggcatggatttgtttagtaggcctgataagcgaagcgccatcaggcaaaaacccggagattaagatccccgggtttttttattatttccggtacagcactttgatgatgtggtagccgaactgggtatgcagcgggccggttggctccagttcagggcaggagaagaccactttatcgaaggctggtaccatctggccctggcggaactcacccagatcgccgccgcgtttgcctgacggacaaatggagtgtttctttgccagcttgccgaaatcggcgccgtttttgagctgctcgagcagatcgagcgccagtttctcttcttttaccaggatatgcagtgctgccgcggttttagccatgattgcgccttgagtgagttgggataaatcagggcgccatagtatcacgcgctagcggcgatacagcaccttgatgatgtggtagccgaatttggttttcaccgggccatagggtttgagcagcggacagctgaagacggcttgatcaaacggaccgaccatcgcgccttgctgaaactcgcctaagtcgccgccgttgcggccagacggacatttagaatagcgtttcgccagatgatcgaagctgacgccccgctccagtttggcgaggatctccagcgccagtttctcttctttgaccaggatatgcagggccgctgcgctttttgccatgacatcattctcaggatggtttgtgtggctgacactttaccatcagtcagtaaatctcggctccgctttctgctacaatccccaccccgttcgaagattgagcaagactcccatgcgtttaaaccctggccaacaacaagccgtcgaattcgtcaccggaccgtgcctggtgctggcgggcgccggttccggtaagacccgcgttattacgaataaaatcgcccacctgatccgcggctgcggctatcaggcgcgccatatcgcggccgtgacctttaccaacaaagccgcgcgcgagatgaaagagcgcgttgggcaaacgctggggcgcaaagaggcgcgtggcctgatgatttccaccttccacactttggggctggatatcattaagcgcgaatacgctgcgctgggtatgaagtctaacttttccttattcgacgataccgaccaggtggcgctgcttaaggaactgaccgaaggattgatcgaagatgacaaagtggtgcttcagcagctgatctcgacgatctccaactggaaaaacgatctaaaaaccccggcgcaggccgccgctggcgcgaaaggcgaacgggatcgtattttcgcccactgctatgggctatacgacgcgcacatgaaggcctgcaatgtcctcgattttgacgatctgatcctgctgccaacgctgctgctgcagcgcaacgaggaggtgcgcgagcgctggcaaaataagatccgctacctgctggtggatgagtatcaggataccaataccagccagtatgagctggtgaaactgctggtgggtcagcgggcgcgctttaccgtggtgggcgatgacgaccagtcgatctactcctggcgcggcgcgcggccgcagaacctggtgctgctcagccaggacttcccggcgctgcgggtgatcaagcttgagcagaactaccgctcatccgggcgtattctgaaagccgccaacattttgatcgctaataaccctcacgtctttgaaaagcggctgttctccgaactgggatatggcgcagagctgaaagtgctctccgccaacaatgaagatcatgaagcggagcgcgtggccggggagctgatcgcccaccacttcattaataaaaccaattacaaagactacgcgatcctttatcgcggcaatcaccagtcgcgggtctttgaaaagatgctgatgcagaaccgcatcccgtacaaaatctccggcggcacgtcgttcttttcgcgtccggaaattaaagatctgctggcctatctgcgcgtgctgaccaacccggacgacgacagcgccttcctgcgtatcgtcaacacgccgaagcgcgagatcggcccggcgacgctgcaaaagctcggtgagtgggcgatgggccgcaacaaaggattgttcaccgccagctttgatatgggtctcagccagacgctgaccgggcgcggctatgaatcccttacccgcttcacccactggctacgcgagatccagcagctggccgaacgcgagccggtcaacgccgtgcgcgatttgattcgcgggatcgactacgaatcctggctgtatgaaacctcgcccagcccgaaagccgcggaaatgcgcatgaaaaacgtcaaccagctgtttacctggatgaccgagatgctggaaggcagcgaaatcgatgagccgatgaccctgacccaggtggtcacccgctttaccctgcgcgacatgatggagcgcggcgaatcggatgaagagctggatcaggtgcagctgatgactctccatgcgtcaaaggggctggagttcccctacgtctatctggtgggaatggaagagggattgctgccgcaccaaagcagcattgatgaagataacgtcgatgaagagcgacggttagcctacgttggcatcacccgtgcgcagaaagagctgacctttacgctctgtaaggagcgccggcaatatggcgagctggtgcgtcctgaaccgagtcgttttctgctggagctacctcaggacgaccttatctgggagcaggcacgcaaaaccattacgcctgaagagcggatgcaaaaaggccaggccaacgtagctaatattcgggcgatgctggcaaaggcgaaaaaagcttagcgtctcaggcgataaactgctgccaggcggcggagaagggcatcaccagtattagcgagggcagcatattggcggtagggaaggcacggatcccgcacagacggaaaccggtcgccagcataatgatgccgccgcaggcggtgaagtcggcgatcatcgacggattgattaacgccatgataaaggttgccgcgaaaaacaggataacgaaaacaatcagctggggaataaagatcacggtgatgatataccccagcgtggaggcgaaaatcgcggcagtaaaaaagtcgaggatcgacttggtcagcagaatggtcgggtcgccggtcatcccttcggttaaggcgccgaagatgccggtaccgctggcgcagaacaggatcagcacggcgataaactgattcataaaatcttccgcaccgacgctggcgctggactgcgccggaaagatacgttcaatggggctgcgcagcgttgttccggctcgttcaatccatttttcaatattcaacaggccgccgataatcgtgccgacaataatagccagggcaatcggcggcaggttatgcaatttattgacaaagaatatgcccatactgattgagatcagtccggcgatcaacggtaaggtttttttgaaatgttccggaataaaacgattcagtgaagcgcccgccagcgcaccaacgagaagcgagccgctacagacaaatatacctatagccataatttattttccctaataaaaatcagggcctgaatatacaggccctgaaatatttaaattaattatttaatgttaaatacgcggctggcattaccccaggcgattttctctttcaggcctgcttcaagttctaaaggatcaaaccagtcgcaggcctgatgaatatcttcatacggataatcgacagagaacatcacgcgatcggcgcccatgacttcaatagcattattcagtgaatgggtattgaaatggccgctggtggtaacgatgaagttattctgcaggtagtgcattaacggtttttccgctttacccaaaccgcagccgaaacgctgacgatagagacgatgttgagtgcgcggcagcatatgtaccagcccttcgccgaggtgacccagcaccagattgaggttaggataacgatcgaacagaccgctcatcatcagacgaatagcatgcactgccgtttcctgagcgaagccccaggcagagccgatcaggctttcgtaaccggtatagatgccacgcgccgggccttccagcggttcacgaggatgcagatagacaggcacgttcagctcgttgaccttatcccagaataccagcatggattcgtcatcaagatacaggccatgctcgctatctttaacgttggtgtagccgttgatcagcgcacctttcatgcctaactttttcacggcgcgctccagctcttccgccgcggcttccgggttctgcaatgccagggtggcgaaggcgctgaatttgtccggatttggcttaacataattctcaacgataaaatcgttggtatcgcgggcaaaagagacggctttggctttatctaaaatagactgggcgccaggtgaagtcagagaaagaattacatgatcaatatgacgctgcgccatttcttccagctgaatgctgcgatccagcaggcggcgttcaacatctttcatatattctgtgccgttacgacctgcttcaccagatgaatcccacagacggttattttcaggagtggatacgtgttcttctaaagcaatttttccgcgcatgatattttccttgcgatatgagtcagtgtggcttgatgcgaggagaataaaagctttcacgtattaccagcaataaaccaaacgtaataggggttattaataaaaccaatacacgggcgtattttgttacttagattttaatagaagtactctgctgtgcgggatcggcaagcgtagcgatcagcgagcgtagccagatatgtccgggatcgcggtgcagccgctgatgccagacctgacggatggcgattttggcgaggggaaaaggcagcggccagctgcggcagggatagcgccgggtgatatgccgcgccacctgttccgggacgacggcaatcatatcgctttcggccaccagctcaccggtacctaaaaaacttggtaacgttagcgcaatgcgccggggcatgtggtgctcatcaagcagcttatccatatcgccatgggcagtcccctccacgcggatcgccagatgcttttcctggcgccagtcttcggcgcggagctgtgcgcgaatgcgaggatggttttccgcagccaggcagacatatgattgatcgaagagatgttgctggtagacgctttccggaagctgcgtcagatagccgatcgcgagatcgcatttcccggattcgagggcgttgagggtctgctcatccagattctgtaccgtaaaggtgatcccgtccgccgcctgctgctggagcgcaatttgcaataaaggcagcagcgtcatttggctgatatcggtcataccgatcgtaaaattacgctggctctgctggggaagaaattcaggtttgaccgctaaatcgttatcggcaagctggagaagagtcgagatggtgggggcgatcgcgtccgctcgcggcgtcgggatcatccgctgcccgacccggacaaacagcgggtcagcaaaatgatctcgtagttttttcagcaaaaggctgccggtgggctggctgatatcgagcgcgtcagccgctggggaaacattgcccaagcggtagagcgcagagaaaaagcgtagcgatttgaaatccagttcttcccgcatccgccctcctggctggatattatttcagcgtatcgccgctggcgacccgaagtatccagtggacgtagctttgccactgacactcctgatcgaccatctcccgacccagcggatgttcatccagccagtttcccggcaatatcagcgtcagttgttcgtcttgagcggtcagctgaatggcgggcaacagatcgtcgcgccgccggctggcaaacaggatagccagtcgcagcagacgacacagatgctcagccacccgcggtgggacggcattctgttgatgaagcgaagagaggtcgatagcgttagtctggttaaggagcagcgtggcaatcagcttcttctgcgccggggtaaagcccggcaggtcgaggttattgaccagataggcggcgtgctgcggcgcgcgcttaaaatccacgctcagcccaatctcatgcagcgcacaggcgctaaggagtaaatcacggcttagcggatccagctcccagctgccatccaactgactgagcagatgactggcaaggccgccgacgcgctgggcctgttctgtgtcgatcataaaacgacgctgaatattacgcagcgtgcggctgcggatgtcctgctcaacggagagatgcagcatgccgtacaccaggccttcgcgtaacgcgccgcccgcgagggtcatacactgaatattcagttcgctgaagatagcgatcaggatcgccagcccgctaggaaacaccagcgcccgctcaagggttaagccttcgatctccagctcttccagacgtccgcactggatagcgcgctgtttaagctgctggagtttggcgagggtgattcgttcatccatcccctgcgccatcataatttcctgcagagcctgaacggtgccggaggcgccaacgcacactttccatccgtgatagcgcagcacatcggcgacgggcagtagcacctcgcgcgcagccgcttcggcgagatcgaaattctctttcgtcagactacggtcggcaaaatagcgttcaagccaggtgacacagcccatcgacaggctaaacagcgaggttgtttgtgcgccggtcccggtcaccagctcggtgctggcgccgccgatatcgaccaccaggcgctgatcggcgccgccggtggtgtgggcgacaccctggtaaatcaggcgcgcttcttcttcgccgctgatcacttgcactggagtgccgaggatctcctgcgctttcgccagaaactcccccgcattgacggcaagacgcagcgtggcggtggccacgacgcggatttgcgtcggcggaatatcctgcaggcgctcggcaaacaggcgtaagcactgccagccccgttccatcgcttctgcggagagggtgttgtcgctattcaggccggcggccagtcgaaccttacgcttaatgcggctcagcgtctggatgctgcccgccacctcgcgcaccaccaacatatggaaactattggagcccaaatcaatggcggcatatagcgaggtggagctcatactcttcatcgttcagaaggctccctggtcggcggggcgcttaggcccgatccacatcactgagcgggtcgccagaggaaggtcgccctggcagattctgaatgactgagcgtatggcatagatctcttaacctgaacgacgacgattgcgcggtggaccgttacggcgcgggccgttgcctgggcgcgcacgggtcagacgcagcggcttaggcaggtcggtcatcagcgcgtccgggttgtacttactgaccggaattgagtgaccaatataggtttcgatcgccggcagattcagcgcatactcttcgcaggcgaggctaatggagtgaccgctggcgccagcgcgaccggtacggccgatgcggtgaacgtaatcttcgcagtcgtccggcagatcgtagttaaagacgtgggtcacggccggaatgtgcaaaccacgagcggcaacatcggtcgcgaccagaatatcgaggtcgccacgggtaaattcttcgagaatgcgcagacgttttttctgcgccacgtcgccggtcagcagacctacgcgatggccgtcggcggcgagatggccccagatatcttcgcaacggtgcttggtattggcgaaaacgatggcgcgatcgggccactcttcttccagcagcgtctgcagcaggcgcattttttcttcgttggacgggtagaagagctcttctttaatacggtggcccgttttctgttccggctcgacttcaacgtactcggcgttattcatttgttcgaacgccagttcgcggacgcgataagaaagggtcgcggagaacagcatgttcaggcgctgagtggccggcggcatgcggcggaacagccagcggatatctttaataaagccgagatcgtacatgcgatcggcttcgtccagcacgacaacctgaatggcgccgaggttaatgtggttctgcttcgcgtaatcgatcagacgaccagtggtgccgatcagaatatcgacgccgctttccagcactttcaactgcttatcgtagccgtcgccgccgtaagccagacccagcttcagaccggtggcctgcgccagtggctcagcgtcggcgtggatctgtaccgccagttcacgcgtcggcgccataatcagcgcgcgcggttggttaacctggcgatcggcgatagccgggtgagagagaagataatgaaacgttgacgtcaggaacgccatcgttttaccggtaccggtttgcgcctgcccggcgacatcgcggccttccagcgtcagcggaagggcgagggcctgaatgggtgtgcaattatgaaaccctttcttttcaagggcttcaatgactgccgggtgcagggcgaagtcggaaaacttctgttctgttaaatgtgttttgctcatagtgtggtagaatatcagctaactattgcattaagaaagcgtatccggtgaaataacgtcaacctttcgttggcggtgtacgaaattattcaaggtacgtctacggtaactgaacgaatccaggatagcttagactactaagcgagtcgggagcgataaatctgcagcatgcagttcgcgttcgggcaccctggcgtcaacaggcgagtccatgatggattgcgccagttggcaggccagagaattgaggtatcctgaagaatagcgtgcataacgtagccgcagcgcgtcgttgatggctacgacaccaacacaccaggcttattcctgtggagttaaatatgagcgataaaattattcacctgactgacgacagttttgacacggacgtactcaaggctgacgggctgaccctcgtcgatttctgggcagagtggtgtggtccgtgcaaaatgatcgccccgattctggatgagatcgctgaagagtatcagggcaaactgaccgtagctaagctgaacattgaccagaacccgggcactgcgccgaaatacggcattcgcggtatcccaaccctgctgctgtttaaaaacggcgaagtggcggccactaaagttggcgccctgtccaagggtcagctgaaagagttcctcgacgctaacctggcgtaagcaaattgctgttccggcgtccagattcctattttttgcggaactctggacgcccggctggagtcgtgctaagttaatccacagacttcgttttaaacataccttgtttgaatcttgttttacccgaagcatcccgcataaatgcgcgtgaagctaataattccgggcttttcactcattccgtctagtcgtttcagttctgcgttctttcctgtgaccaggcaacgtacagacacgagatgaaggccgttaacaggcatggaagttcctgccataccattcacaacattaagttcgagatttaccccgagtttaagaacccacaccactatgaatcttaccgaattaaagaatacgccggtttctgagctgattactctcggcgaaaatatggggctggaaaacctggctcgtatgcgtaagcaggatattatttttgccatcctcaagcagcattcgaagagtggcgaagatatctttggcgacggcgtactggagatactgcaggatggatttggattcctccgctccgcagacagctcctacctcgccggccctgacgacatctacgtatcccccagccaaatccgccgtttcaacctccgcactggtgacaccatttccggtaagattcgtcctccgaaagagggtgaacgttactttgcgctgctgaaagttaacgaagttaactacgacaagccggaaaacgcgcgtaacaagatcctgttcgagaacttaacgccgctgcacgcgaactctcgcctgcgtatggagcgtggtaacggttctaccgaagacttaaccgctcgcgtactggatctggcctccccgattggccgcggccagcgtggtctgatcgtcgcgccgccgaaggccggtaaaaccatgctgctgcagaatatcgcgcagagcatcgcatacaaccacccggactgtgtcctgatggtactgctgatcgacgaacgtccggaagaagtgaccgagatgcagcgtctggtgaaaggtgaagtggttgcttccacctttgacgagccggcatcccgtcacgtgcaggttgccgagatggttattgagaaagcgaaacgtctggttgaacacaagaaagacgttatcatcctgctcgactctattacccgtctggcgcgtgcctacaacaccgtggttccggcttccggtaaagtgttgaccggtggtgtggacgccaacgccctgcaccgtccgaagcgtttctttggtgcggcacgtaacgtcgaggagggcggtagcctgaccatcatcgccacggcgctgatcgacaccggttccaaaatggacgaagttatctacgaagagtttaaaggcaccggtaacatggaactgcacctctctcgtaagattgctgaaaaacgcgtcttcccggctatcgactacaaccgttccggtacccgtaaagaagagctgcttaccactcaggaagagctgcagaaaatgtggatcctgcgcaaaattatccatccgatgggtgagattgatgcgatggaattcctcatcaataagctggcaatgaccaagacgaatgatgacttcttcgatatgatgaagcgctcgtaaggtaaaaaaagccaaaaacgccacgcctttgcgtggcgttttcattttggggtttgtatgatccagagacagagaaagcgggacgaaagttgtcgtataatggcgccggatagcaggcggagacagctttaacagactaaaatctatacaataaatttgtaatgttctgcttttccccttctggagttggggcatcatcgctatacttcccggattaactatgctgagagcacatgcgttgtgaatttactcactgctattactgaattaatcagtattttcttattcacgaccctctttatttttgtcgcgcggaaagtggcaaaaaagatcgggttagtggataaacccaactatcgcaaacggcatcaggggttgattccgttggtcggtggtatctcagtttatgcaggtatctgtttcactttcgccatcgccgattattatattcctcacgcctcgctgtatctggcctgcgcgggggtattggtgctggttggcgcgcttgacgatcgcttcgacatcagcgtgaaaattcgcgcggtcattcaggccgcgatcgccgtgattatgatgatggcagggaatctgcatctgagtagtttgggctttatttttggctcgtgggaactggtgctggggcccttcggcttcttcctgacgctgtttgccgtctgggccgctatcaatgcgttcaacatggtcgatggtatcgacggcctgctcggcggactgtcatcggtctcttttgcggcgaccgggattatcctttggtttgatggtcagtacagcctggcgatgtggtgtttcgcgatgatcgccgccattctgccctatattcttctcaatcttggcgccctcggccgccgctataaagtctttatgggtgacgccggcagcacgatgattggcttcaccatcatctggatcctgctggaaaccacgcaaggtaaaacgcatcccattagcccggtgaccgcgctgtggattatcgctatcccgttgatggacatggtggcgattatgtatcgccgcctgcgcaaaggcatgagtcctttctcaccggaccgtcagcatattcatcatttgatcatgcgcgccgggtttacttcccgccaggcgtttgtcctgattaccctggccgccgccctgctggcgctggttggcgtcgtggcggaatacacccgcattgtgccggaatgggtgatgttaattctctttttggtagccttctttctttatggctactgtattaagcgcgcctggaaagtggcgcgcctggttaagcgcatcagacgcagaattcggcgacacagcggcaataatccgaaactaaccaagtagagctggggatgtgatgactcaaccattaccgggagcacaagcagtgaacgttgagaacgagctggatattcgcgggctgtttcgcgctttatgggcaggaaaaggctggatagtcggcggcgccgtactcttcgccgccatcgtgctggtgtacaccttctttgctcgccaggagtggagcgccacggcgatcaccgatcggcctactgtcaatatgttggggggatactattcccaacagcagttcttacgcaatctggacattaaagccgacctcgcctcggtcgaccagccttccgccatggatgaagcgtataaagagttcatcatgcagctggcctcctgggatacccggcgcgatttctggctgcaaacggactactacaagcagcgtcagtcgggtaatgcccgcgctgatgcggcgatgctggatgacctgattaacaatatccagtttatgccaggcgatgcggccaagagcattaacgacagcgtcaaactgaccgccgagaccgggcaggatgccaataatctgttgcgtcagtatgtggccttcgccagccagcgggcggcaggccatcttaacgacgaacttaaaggcgcctgggcggcgcggacggtgcagatgaaggcgcaggtgaagcgccaggaagaggtggccgaggccatcttcaaccgccggacgcacagcgtggagcaggcgctgaaggtggctcagcagcacaatatttcacgtagcgaaacggatgttcctgccgatcagttgccggattcagagctatttttattgggcaggccgatgctgcaggccaggctggaaaacctgcaggccgtcgggccggaatatgacctcgattacgaccagaaccgcgccatgctgagcacgttgaacgtcggtccaacgttagatccgcgttttcagacttaccggtatttgcggacgccggaagaacctgtaaaacgcgatagcccgcgccgtgtatttctgatggtgatgtgggggattgtgggtgcgctcatcggcgcaggcgtggcgttatcgcgtcgtcgtgtcctgtgattgcggcctgtggtgaagggcagatgaccttcatcgcctaatcgaagagaatcgatgtgaaagtactaactgtatttggcacgaggccggaagccatcaagatggcgcctctggtccatgcgctggcaaaggatcctcattttgaggcgaaagtatgcgtgaccgcgcagcatcgggagatgctcgatcaggtgttgaaacttttctctattgtcccggactacgatctcaacatcatgaagccggggcaggggctgaccgagatcacctgtcgcatccttgaagggctgaagccggtgctggagtcgtttaaacccgacgtggtgctggtgcatggcgataccaccaccaccatggcggcgagcctggcggcgttttaccagcggataccggtgggtcacgtagaggccggcctgcgcaccggcgatttaagttcgccgtggccggaagaaggcaaccgtacgttgaccggccatctggcgacataccatttcgcccccacggaaacctcgcggcagaacctgctgcgggaaaatattgccgacagtcggatcacggttaccgggaatacggtcattgacgccctgttctgggtgcgggatcgggtgctgggtgatgaagcgctacgggagaccctgctgcagcgctatcctttcatcagccacggtaaaaagatgattctggttaccggccaccggcgggaaagctttgggctcggttttgaacagatctgccaggcgctggccgagatagcccatacccaccctgaggtgcagattgtctatccggttcacctgaatcctaatgtcagcgagccggtgaatcgtattcttggtcatattgacaatgtgatgttgattgaaccgcaggattacctgccgttcgtctggctgatggatcgcgcctggctgatcctgaccgattccggcggcattcaggaagaggccccctcgctgggtaagccggtgctggtcatgcgcgatatgaccgaacgtccggaagcggtggccgccggcaccgtgtgtctggtgggcaccgacagccagcgcatcgtcgcggaagtgacgcgactgctggaggatgatgctgcataccaggcgatgagccgcgcgcataatccctatggcgatggcgaagcatgtcgtcgcattttgtctgcacttaaaaataatcaggtaacgctatgagtttttctaccatttcagtgattggccttggctatatcgggctgccaaccgctgccgcgttcgcctcccggcagaagcgggtggtcggcgttgatgttaatcaacatgccgtggagaccattaaccgtggagagattcatatcgtggagccggatctggcgagcgtggtgaagaccgcggtcgagcaggggtatttaagcgccaccaccaccccggtggaggcggatgcttacctgattgccgtgccgacgccgtttaaagatcgccacgagccggatatggtgtttgtcgagtcggccgccaaatctattgcgccgacgttaaagaaaggctcgctggtgatcctcgagtccacttcgccggtcgggtcgaccgaacagatggccgagtggctggcggagatgcgcccggatcttagcttcccccagcaggtgggtgaagcggcggacgtgaatatcgcctactgcccggagcgggtattgcccggtcaggtgatggtcgagctgattaaaaacgaccgcgttatcggcggcatgtcgccggtctgctccgctcgcgccagcgagctgtataaaatcttccttgaaggcgaatgcgtggtgaccaactcgcgcaccgccgagatgtgcaagctgacggaaaacagcttccgcgacgtcaacatcgcttttgccaacgagctgtcgctgatttgcgccgaccaggggattaacgtctgggagctgatccgcctggcgaaccgccatccgcgcgtcaatatcctgcagccgggcccgggtgttggcggccactgtatcgccgtcgacccatggtttatcgtggcgcaaaacccgcagcaggcgcgtctgatccgcaccgctcgcgaggtcaacgaccacaagccggaatgggttatcgaacaggtgaaagcgcaggtggcggactgcctgaatgccaccaacaagcgggccagcgaactgacgatcgcctgttttggcctcgcttttaaaccgaatattgacgacctgcgcgaaagtccggcgatggaaattgccgcgcagattgcccgctggcacagcggcacgacccaggtggttgagcccaacattcacgcgctgccgaagaaactcgatggactgtgtacgctggcgacccttgaggcggcgctggccagcgccgatgtgctggtgatgctggtcgatcacaatgaatttaaagccgttagcggcgatagcgtcacccaggcgtttatcgttgacaccaaaggagtgtggcggtgagaaccattctggtcaccggcggcgcgggcttcattggttcggcggtagtgcgggagattatccagcacaccgccgatcgcgtggtggtggtggataaactgacctacgccggcaatttaatgtcgctggcgccggtggcgcaggatgcgcgtttcgcctttgaacaggtggatatctgcgaccgcgccgagctggatcgcatttttcgtcagcatcaaccggatacggtgatgcacctggcggcggaaagccatgtcgatcgttcgattgacggcccggcggcgtttatcgagaccaatatcgtgggcacctatacgctgctggaggcggcccgtagctggtggaataccctggctacggcgcaaaaatcggcgtttcgcttccatcacatctccaccgatgaagtgtatggcgatctgcacggcagcgatgatttctttaccgagaccacgccctatgcgccaagcagcccctattcggcttcgaaagccagcagcgaccacctggtgcgcgcctggctgcgaacctatggcctgccgacgcttatcaccaactgctcaaataactacggcccgtatcactttcccgagaagctgatcccgctgacgatccttaacgcgctggcgggcaagccgctgccggtgtatggcaatggacaacagatccgcgactggctgtacgtggaagatcacgccagagcgctgtatctggtggcgacccgcggcgaaccgggcgaaacttacaatatcggcggtcataacgaacggaaaaatatcgaggtggtggaaaccatttgtcagctgctggaagagctggcgccggataagccgcagggcgtggcgcactatcgcgatctgatcgccttcgttgccgatcgtccgggccacgatctgcgctatgccattgatgcctcgaagattgcccgcgagctgggctggacgccggcagagactttcacctccggtatgcgtaagaccgtggcgtggtatctggcgaacgaggcctggtggcgtcaggttcaggacggaagctatcagggcgagcgtcttgggctgcaaagctaatcatctctggggggaatgatgaaaggtattattctggcaggcggttccggaacgcggctacatcccatcacccgcggcgtatcgaagcagctgttgccgatctacgataagccgatgatctactacccgctgtcggtattaatgctggccgggatccgtgagatcctgattatcaccacgccggacgacctacgtgatttccagcgcctgctcggcgatggctcagagtttggcattgcgctgcactatgccgtacagccgacgccggatggtttagcccaggcgtttatcatcggagaagcctttcttaacggcgaaccggcgtgtctggtgttaggcgacaatatcttcttcggccaaagctttagcccgaagctgcgcagcgtcgctgcccgcacggaaggggcgacgatttttggctatcaggtgatggatcctgagcgctttggcgtggtggagtttgatgataacttccgtgcgctatcgctggaagagaagccgaagcagccgaagtcgaactgggcggtcaccggtctctatttctacgatggcaaggtgacggagtatgccaaacgggtcaagccatccgagcgcggcgagctggaaatcacctccatcaaccagatgtatctggaggatggcgcattgaccgtcgaactgcttggacgcggctttgcctggctggacaccggcacccacgatagcctgatcgaggccagcatgttcgtgcagaccgtcgagaagcgccagggctttaaaatcgcctgtctggaagagatcggctggcgtaacggctggctggacgacgacggcgtcaaacgtgcggcgaagcggctggaaaaaaccggctacggccaatatctgctggatctgctccgtgcccgtccgcgccagtattgaccccctggagtgggagaaccgcttctttgccgtgaacagcgcgatcgtgcgctttgacgagcacgcgccgcggctgacgcctgaggcgctggcggggtggtcgcgagtgcaggcgaagatcgccgccagcgacaccgtccggctggacgcgctgcagcggctgggttttcagctggtggaaggtgaggtcgatctggcgctgccggtgggcagccctgcagatgccggcgcagacgtcgccgtggaagcggatattgcgccgctgcgcgagcaggcggcgcaggcatttgccatgagccgctttcgcgcgccctggtacgctgccgacgccagcggccgcttctatgcccagtggattgaaaatgcggtgcgcggcaccttcgatcatcagtgcctgatttaccgccatcctgagggcgatattcgcgcctttgtctccctgcggcagatcactgcgaccgaagcgcgtatcggcctgctggccggacgcggcgccggggcgcagttgatgcaggcggcgcggtactgggccgcctcgcgcggactttctacactgcgggtggcgacccagatgggcaacaccgccgcgcttaaacgttatattctcagcggtgctaacgtggaaagcaccgcctactggctatacaggtgacccccatgatcccatttaacgcgccgccggtggttggaaccgagcttgattacatgcagtctgcgatgaacagcggcaagctgtgcggcgacggcggctttacgcgccgctgccagcagtggatggagcagcgatttggcacggcaaaagcgctactgaccccttcctgcacggcttcgctggagatggccgcgctgctgctggatatccagccgggcgacgaagtgattatgcccagctatacctttgtctccaccgccaacgcctttgtgctgcgcggggcgaaaatcgtcttcgttgatatccgtcgcgatacgatgaatatcgacgaaacgctcatcgaagccgccatcaccgataaaacccgggcgattgtcccggtgcattatgccggcgtagcctgcgagatggacaccatcatggccatcgccgacaaatacaacctgtttgtggtggaagacgccgcacagggggtgatgtccacctacaaggggcgcgcgctgggcaccatcggccatatcggctgcttcagcttccatgaaaccaaaaactacaccgccggcggtgagggcggggcgacgctgatcaacgatcgcacgctggtggaacgcgcggagattattcgcgaaaaaggcaccaaccgcagccagttctttcgcggcctggtggataaatatacctggcgggacattggctccagctatctgatgtccgacctgcaggccgcctatctgtgggcgcagctggaagcggcggagcgcatcaaccagcagcgcctggccctgtggcagaactactatgatgcgctgctgccgctggcgcgcgccgggcgtatcgaactgccgacggttccggccgactgcgggcaaaacgcgcacatgttctacattaagctgcgcgatatcgaggatcgcagcagactgatcgcctggctgaaagaggcggagatcctcgcggtattccattacattcccctgcacagctgcccggcaggcgaacagttcggcgaattccgcggtgaagaccgctacaccactcaggagagcgagcgtctggtacgcctgccgctgttttacaatctgtctgtggtgaaccagcggacggtgattaactcgctgctgagctacttctcctgatatgtcgttagcaaaagcctcactgtggacggcggcatcgacgctggtcaaaatcggcgccggtctgctggtcgtcaagctgctggccgtctcgtttgggccggcgggcgttggccaggccggtaacttccggcaactggtcaccgtactcggcgtgctggccggggccgggatatttaatggcgtcacgaagctggtggcgcagcatcacgacgatcccccgcgcctgaagcaggtggtgggcacctcgtcggcgatggtgcttggcttttccaccctgctggcgctggtatttttactggcggcggcgccgataagccaggggctgttcggccatacgcactatcaggggctggtacgcctggtggcgctggtgcagatggggatcgcctgggcgaatttcctgctggcgctgatgaaaggctttcgcgatgcggcgggtaacgccttctcgctgattgccgggagcctgatcggcgtggcggcttactatgcttgctacgtgttgggaggctatcagggcgcgctgctggggctggcgttagttccagcgctggtggtggtcccggcgggtattatgctctggcggcggggtaatatcccgctgagcgccctgcgtccgcgctgggataacggtctggcgggacagctatcgaaatttaccctgatggcgctgataacctcggtgaccctgccggtagcctatgtgatgatgcgtaatctgctggcggcgcattacggctgggaggcggtcgggatctggcagggggtgagcagcatctccgatgcctacctgcagtttattaccgcctcgtttagcgtctatctgctgccgacgctgtcgcggctgagcgccaaaacggatatcacccgcgagatagtcaagtcgctgaaattcgtcctgccggcagtagcggcggcgagcctgacggtctggctgctgcgcgattttgccatctggctgctgttttccgatcgctttaccgcgatgcgtgacctgtttgcctggcagctggtgggcgacgttttaaaagtaggcgcttacgtctatggctatctggtgatcgccaaagcgtcgctgcgtttttatattctgacggaaatcagccagttcgcactgctgaccgcattctcacactggcttataccggcgcacggcgcggttggcgcggcgcaggcatatatggccacttatattgtttatttcgccctttgtagtggcgtgtttttactctggcgtaaacgggcatgacagcactgatacatgtactgggatcggatatcccgcatcataaccagaccgtactgcggttctttaacgacgaactggccgccgacccgcaggccaggagatttatgatcgtcggtgatgaggccagcgtgcgtgatgggtatccggcgctggatgtcacctgctatccggggaagaaatcgctggcgcaggcagtgattgctaccgcgaaagccaaccgccagcagcgctttttcttccacggccagttcaataccgggctgtggctggcgctgttgagcggcggcatccgcccgtcgcagtttaactggcatatctggggggcggatctgtatgaaaattctgccagcctgaagtttcgcctgttctatccgctgcgccgtatggcgcaggggcgggtagggcgcgttttcgccacccgcggcgatctcagctggttcgctaaccgccatccgcgcgtcccgggcgagctgctctacttcccgacccgtatggatccggcgctgaataccctggccgataacgctccgcgcggtgataccctgactattctggtcggcaactccggggatcgcagcaatgaacatattgccgcgctgaaggcaatccatcagcagtttggcgatacggtaaacgtcatcgtgccgatgggctatccagcgaaaaacgacgcctatatcaatgaggttcgcgaggcgggggcggcgctgtttagcggtgagcatctgcagatcctcagcgagaagctggagtttcatgattatctggcgctgctgcgccgctgcgatctgggctattttctgtttgcccgccagcaggggatcggcaccctgtgtctgctgattcaggcgggcatcccctgcgtgctcaatcgggaaaacccgttctggcaggatatggccgagcagcatgtgccggtgctgttcaccagcgacgcgctggacgtcagcgtggtgcgcgaagcgcagcgtcagctggcgagcgtggataaatccgctatcgccttcttccggccgaactatctgacgggctggcggcgggcgctacggttagcggcggaggggcaggcatgacgttaatgcaatttagcgggctgctggtggtctggctgctgtcgacgctgttcatcgtcaccgccacctggtttgagttccgtcgggtacgctttaacttcaacgtttttttctcgttgctgtttctgctgacctttttcttcggcttcccgctgaccagtattctggtgttccgctttgacgtcagcgtggcgccgccggagattttgctgcagacgctgctgatcgcggtgtgcttctacgcagtctactacgtgacctataaaacgcggctgcgttcggcatcgcgtgaggttgcgcatcgcccgctgtttaccatgaaccgggtggaaacccatctggcgtggggcattttgatggggctggcgctgctgtgcgtcggcatcttcttcgcccacaacggtttcctgctgtttaagctcaactcctacagccagattttctctgctgaagtgtccggcgtggcgttgaagcgcttcttttacttctttattccggcgatgctggtggtctattttctgcgccaggattataaggcatggatcttcttcctcgtcagcacggtggcctttggtttgctgacctacgccatcgtcggcgggacccgcgccaatatcatcatcgccttcgccatctttctgttcatcggtattattcgcggctggatcagcctgtggatgctggcggcggcgggtgtgctgggtattgtcggcatgttctggctggcgctgaagcgctacgggatgaacgtcagcggcgacgaagcgttttataccttcctctatctcacacgcgataccttctcaccgtgggagaacctggcgctgctgctgcagaactacgacaagatcgatttccagggtctggcgccgatgatccgcgacttctacgtctttatccccagctggatgtggcacggtcgcccgacgatggtgctcaataccgccaactactttacctgggaagtattaaacaaccattcggggctggcgatttcgccgacgctgattggctcgctggtggtgatgggcggcgtctggttcgtaccgctgggcgccgtggcggtagggttgattattaaatggttcgactggctgtatgagctgggcaaccgggagagcaatcgctataaagcggctatcctgcacagtttctgtttcggcgctatcttcaacatgatagtgctggcgcgcgaggggctggattcgttcggctcccgcgtggtgtttttcctcgtgatctttggtatctgcttgctggcggcgaaactgctgtactggttcctggatagcgtgggactgattcataagcgcgtaaaaccgctttcgcaaccgcaagtctgagaaggatggacatgactgggaccatttccgcgccgttgtacctgttaagagggctgcagcttataggctggcgcgatatgccgcacgctctggattatttgtttgccgatggcgttctccgcgaggggacgctggtggccattaatgctgagaaaatgctggccgcagaggataacccggaggtacgggcgctgattgaggcggcggagtttaaatatgccgatggcatcagcgtggtgcgttcgctgcgcaaaaaatacccgcaggcccaggtatcccgcgtcgccggggccgatctctgggaagcgttaatgcagcgcgccggcgctgaagggacaccggtgtttttggttggtggtaaacctgaggtcctggcgcagacagaatccaggctgcgtcagcgctggcaggtgaacatcgtcggcagccaggacggttatttcacccctgagcaacgccaggcattgttcgaacgcattcgcgacagcggggcgaaaatcgtcaccgtcgcgatggggtcgccgcgccaggagatctttatgcgcgactgccggcgcctgtatccgcacgcgctgtatatgggcgtcggcggcacttacgatgtttttaccgggcacgtccatcgggcgccgaagttctggcaggatctggggctggagtggttctatcgcctgcttttgcagccgagccgtatcaaaagacagttccgtctgctgcgctatttacgttggcattattccggtaagctctgatattccactgcaaccaggcgagtttgcatacatattctgtgtaatctcttcactcgcctgatactttatttgccatttccgcaaaattaattaaccattcgcaggcttcatacgcgccggggagacctgcgcgtcggcaaggctatggtttcagttaataacaataaccgggagtacccggaatacggcaaacacaagaggatatatgactgagaaaaaagcggagctccagcgtggactggaggcccggcatattgaactgatcgcccttggcgggacgattggcgtggggttgtttatgggggcggccagtaccttgaaatgggctgggccttccgtgctgctggcgtacattatcgctggcctgttcgtctttttcattatgcgctcaatgggcgaaatgctgttccttgagcctgtcacaggctccttcgcggtgtatgcgcatcgctatatgagccccttcttcggctatctgaccgcgtggtcctactggtttatgtggatggcggtggggatctcggagattaccgccatcggggtctatgtgcagttctggttcccggagatggcgcagtggatcccggcgttgattgccgtggggctggtggcgttggctaacctcgcggcggtccggctatacggtgaaatcgagttctggttcgccatgataaaagtgaccaccattatcgtgatgatcgtcgtgggtctgggcgtcattttcttcggctttggcaacggcggccactccatcggttttggtaatctcaccgaacatggtggtttctttgccggcggctggaagggcttcctgacggcgctgtgtatcgtggtcgcgtcctatcagggggtggagctcatcggcattaccgcaggtgaagcgaaaaacccgcaggtgacgctgcgcagcgcggtgggcaaagtgctgtggcggatcctgattttctacgtcggcgcgatttttgttatcgtcactatcttcccgtgggatcaaatcggctccaacggcagcccgttcgtactgacgtttgccaaaatcggtattaccgcggcggcgggaattatcaacttcgtggtgctgacggcagcgctttccggctgcaacagcggaatgtacagctgcggacgtatgctgtacgccctggcgaagaaccgtcagctgccggcggcgatcggtaaggtatcgcgcaacggcgttccgtccgtcggtgtggcgctgtcgattctgatcctgctggtgggctcctgcctgaattacattattcctaatccgcagcgggtgttcgtctatgtctatagcgccagcgtcctgccggggatggtgccctggtttgtgatcctgattagtcagctgcgtttccgtcgcgtgcatcaggcggcgattgccagccatccgttccgttcgctgctgtttccgtgggccaactatttcacgatggccttcctgatctgcgtgctggtcgggatgggactgaatgatgaaacccgcatgtcgctcttcgtcggcattatttttctggccgccgtcaccctgatttataaggtgtttggcctcggaagacaggggcaagtcaataatacggctgaataaccatcaaaacgaacaaagcatgagcaaacgataattttctttaaaaaggcactagacagcggggtaggaagtccgtattatccgaccccgcaacggcgctaagcgcccgtagctcagctggatagagcgctgccctccggaggcagaggtctcaggttcgaatcctgtcgggcgcaccattaacccggtgctggagctgcggtggttttaataccgcgtaaaaggtttgcagtggtggctatagctcagttggtagagccctggattgtgattccagttgtcgtgggttcgaatcccattagccaccccattatttgatagagttgtgaatttgcgaaggtggcggaattggtagacgcgctagcttcaggtgttagtgttcttacggacgtgggggttcaagtccccccctcgcaccacgactttaacgaattgaactaaaaattcaaaaagcagtatttcggcgagtagcgcagcttggtagcgcaactggtttgggaccagtgggtcggaggttcgaatcctctctcgccgaccaattttgaaccccgcttcggcggggttttttgttttctgctgccggccgccatctcttatttctctgatcttgctgataaaaaatcttctctttgcttaagaatacgcgtcaggaaaactctcaattcatcactgtggtagatgcaatttccccggatcctgtgcgataataaccgggtagatgctcattccatctcttatgttcgccttcgtgcctcataaactccggaatgatgcagagccgttcttacggtgcttatcgtccactgacagatgtcgcatttatgcctcatcaaacaccatggacattacgttgagtgaagcacccaatttgttgtcaaacagacctgttttaacgcctgccctgatttcagcgcaggcgtttttttctttcggggatccgtcaatgtgaaggcgggggagaagggctatcgccccgcaggaggcgatagccatgccaggttatggctgaggattattctgcagcgtcagcagcagtccatctcggcgcatagcggcggcttcttccggctgatgcaggcggtccaggacatccgccagccaggcgtaatcaaaggcatccggacgctgcttaagcgcggcgcggaaggcgatgctggcctcctgccattcgccgtgccgcatcagcgactggcccagggtgctccacagcagcggacggtcgccaacggctttgatctgctggcgcagcactttctccagctgttccgggttattggtcttcagacgcgggatcggcatcaccagacggtcatcatactgtttcttcagaccatcaatgataatttgctgcgcggtatcgtgatcgtcgctctcgatgaggcgctcggccatcgccacctgcagcggcaccagcgcccgcgttttacggctctggttgcgccaccattcgcgtagtccttcgctgccgccatcggccagcgctttatccatcaggccaacccaggccagctgttccagcgccgcacggtgcgcttcatcgccgacgttagctttcgccatcgacggaatgatgtccagcagcgactgccaggcgccggtgcgggtgtatgcctgttcggcgaggcgcagcacttccggatgacgcggggtaatttccagcagcttatcgatgccatggcgcgcggcgtgattttcattacgcgccagctgcaggcgaacgcgagtgatttccaccgggatcaggtcatcgcccgccagctcggtggcgcgctccagatgctggttggcccgcgcttcatcgccgcgctgctgggccgcttccgccgccagcagatagttcaccaccggctgttcggcgtgatcggcatttttcgccatcagcttctcaacctgctggtaatcaccttccgccagcttaagcagcgcctgctcggtttgcttacgcgcgcgacggcgtttacggccgacaaaccagccgcgcgtatgcgccccggtgcggaaaatgcggcgcagcagccattcaatggcgaacagcaccaccatggcgaggatcaggatgatcaccagcccggtcacgctggtctcgatattgtaattatcggtctggatcaggacgtagccctgatgcccggcgatcatcgggccaagcacgatcccggcgatcaacagcgcgaagagtaaaagaattttcagcatgcgttactctccttgcggcgcagcgggggcggccggcgcagcaggtgcgggcgaaggcgcgccgcccgcggtaacggcaggctgcgccatcaggttgcgcactcgggtctgcatcagtttttccagcaacgcctggctctgcagcgtttccggcaccgtcatggtaatgctttgctgactgagcttatccacctcgtcgaggaaggctttggtggtggcgtcatcggtatcataataggcgcgtacccaggtcgagacgttatccagcgactgtttccaggtctcttcctgatggcgcggaactgcctgcgcggcgaccagcaggcgagagcgaatattttcccgcagatagatatcctgattcggcgccagcagcgggaccgccgtttcatcgcggcggcgcacggtgataaagctgtccataaagttctgccagcttttctgcaggttgacgcgccattcgctgatagagctggaaagctcatcgctatcagcgtccatcggcgaatcgtcatcgttattatcggccagccgcaggttatcgatttggttcgccagctgattaaccttgaggatcatgccgtcgtagtccacctggcttaccgcggagagggtggcgatgtcgtcggtgatcgcccggcgggcgccgatgaggcttgggtcgttcatgtcggcgaggctggcgtcagcgcttttcagcagcgcggcggcggtggtgacatcctgatcgctccacagcttacgtcccgccagcttgacgaggaagtcggcctgggccagcagccaggttttggcatcgctaccggaaatcaccgccactttttgctgcagctcatccaactgtttggccagcgtctcctgctggtgtttggcttcgtttagctggtcggcctgctgtttgataacaccttccagttcacttttttgattttcctgcgctttttgcagcgccgcgacctggcttgctaattcagaggtagttgcgttttgccgcgtggcctgttgtttgttcaggccatacaggccgatgccggcggctatcgcaatggcgatagcgatcgcgctgagcgccaggctggttttattgcctgccttcttcttctcagtattctctggctgtggtgtggtctccacggcctccctggtctcttcaaccacggcggattgattttgttgttccgtcattatggcttccaatgttgagagttattgtaatgcgcgtagcagcgcatcgttgtcggcgctatcggcaacctgaatctcctgccagcccagttcccgggcctgaagggccagacgttcgctgacaacgacaacgcggcagtgcaggagccactgttcgcgataccattgcggtattaacgaccatagctgctgcagcatctcgccgctggtgaccaccagcgtggtgactccgcgagattgccagcgcatcgcttcttctgcgccatcgtaatgttttgcactacgttgataacattcacaaaatgtgaccctggcgccgcgctcggtcagcgtcgcgcctaagagttcccgcccgccattgccgcgtaggatcagcgcatttttcccggcaatgttttgtaattcaggtaattgtagcaagacttcgctaatttcccgatctaacggataatggatatgctgcccactgaccgtatgcagggccagcgccgtcgtgcggccaatggcaaaatagcgcggagaagtgggccagggcaggccctgctgctgcagacgggcatgggcgaattccaccgcatgctgggatagcgcaaatagcagatcgtcgggccccagtcgggcaagcgcatcgcccagcgcgggaagctccctgccgggcgtaaattctatcagcggaaagctccaggccacgcgtcccatggcccgcagacggctgaccagcgcttctccttgcggtagtggacgagtgaccaggatgctcatcgcggggcttctccatcataaaccgccgcgagaatctcgcgggcgccattatccagaagctcttccgccagcgagatgccgagggcttccgcctgttccgctggcccgcgtcgttcgccgcgcaccagctgtgaaccatccggagcgccaaccagcgcccgcagccacagttccccgtccttcagttccgcatagctgccgatcggcacctggcagccgccttcgaggcgggtgttcatcgcccgctcggcgcgcacgcgcaccgccgtttccgtatggttgagaggcgctaacagcccccgggtccatgcatcatcaagacggcattcgatgccgaccgcgccctggccgaccgccggcagagattgctcaggcgacagcggctggcgaatacgcgcttccagctgcaggcgcttcaggccggcggcggcgaggatgatggcgtcgtactcgccgttatccagcttactcagccgggtaccgacgttaccgcgcagagagcggatcgccaggtccggacgggtggcggccagctggcactgacggcgtaaacttgacgtgccaacgacgctgccggccggcagttcgtcaatcgaggcatagcgattggagacaaacgcgtcgcgcggatcgtcgcgctcgcagatagtcaccagccccaggccctccgggaattccaccggcacatctttcatcgaatggacggcgatatcggcgcgcccttcgagcatggcgagctctaactctttcacaaataagcctttgccccccacctttgccagcggagtatcaaggatgacatccccgcgcgtgaccatcggcaccagctcgaccttcagtccgggatgcgcttgttccaggcgcgctttaacatactgcgcctgccatagcgcaagcgggctttgccgtgtggcaattttcaaaactttgtctaacatgcttgttaccgtcattatcgaccactatccatcctaacattgttgtcttacggatgttagttttcacggtttatgtgggaggtggctccggcccactcttttttaacctttcatgcgcgtggcggttgccggaggcgtagtgaggaatttacagataataaacggtgctacacttgtatgtagcgcatctttctttacggtcaatgagcaaggtgttaaattgatcacgttttaaaccatttgtcagtccgctgctcatcacaaccacaccgacgacgaatggtgacggtttttgttgaaatactgaaatcctccgtactattgtacctcgggtttttgaacatcaggcgatatgtcttgtacctctatattgagacactgaaacagagactggatgccatcaaccaattgcgcgtggatcgcgcgcttgctgccatgggacccgctttccagcaggtttacagtctactgccaacgttattacattatcatcacccgctgatgccgggttaccttgacggtaacgttccccgtggcatttgcctctacacgcctgatgaaacccaacgccactatcttgaggaactggaactgcatcgcggtatgcagactcaggagccgccgaaaggcgagctgccgatcaccggcgtctactcgatgggcagtacttcctccgtcggccagagctgctcttccgatcttgatatctgggtatgtcaccaggcctggctggatagcgaagagcgtcagctgctgcagcgaaaatgcagcctgcttgagagctgggctgcctcgctcggcgtggaagtcagcttcttcctgatcgacgaaaaccgtttccgtcataacgaaagcggtagcctcggcggcgaagactgcggttcgacccagcatatcctgttgcttgatgagttctaccgcaccgcggtgcgcctcgccggcaagcgtattctgtggaatatggtgccgtgcgatgaagaagagcattacgatgattacgtgatggggctgtatgcccagggcgtgctgacgcctaacgaatggctcgatctcggcggcctcagttcgctgtcggcggaagagtacttcggcgccagcctgtggcagctgtataaaagtatcgactccccctataaagcggtgctgaaaacgctgctgctggaagcctactcctgggaataccccaataaccgcctgttagcgaaagatatcaaacagcgtctgcacgacggggagattgtctccttcggcctcgacccgtactgcatgatgctggagcgcgtgaccacctatctgcaggccatcgaagatgaaacccgcctcgatctggtgcgccgctgcttctacctgaaagtttgtgaaaaactcagccgcgaacgcgcctgcgtcggctggcgtcgcgaagtcgtcagccagttggtgaatgcctggggctgggacgaaaagcgtctgatgatgctcgacaaccgcgccaactggaaaatcgatgaagtgcgcaaggcgcacaacgaactgctcgacgccatgatgcagagctatcgtaatctgatccgcttcgcgcggcgcaataaccttagcgtctccgccagcccgcaggatattggcgtgctgacccgtaagctgtatgcggcctttgaagcgctgccggggaaagtgacgctggtaaacccgcaaatttcgccggatctgtcggaaccgaacctgacctttatccacgtgccgccgggccgcgccaaccgtaccggttggtatctgtacaaccgcgcgccggacatggaatcgatcatcagccatcagccgctggaatataaccgttatcttaataagctggtggcctgggcctggtttaacggcctgctgacctcacgcacccgcctgtttattaagggcaacggcatcgtcgatctggcgaagctgcaggagatggtggccgacgtgtcgcaccacttcccgctgcgcctgccggcgccgacgccaaaggcgctgtacagcccgtgcgaaatccgccacctggcgattatcgtcaacctcgaatatgacccaaccgcggccttccgtaaccaggtggtgcacttcgatttccgtaagctggatgttttcagcttcggcgaagagcaaaaatgcctgatcggcagcgtcgacctgctgtatcgcaactcgtggaacgaagtgcgtacgctgcactttaacggcgaacaggcgatgatcgaggcgctgaaaacgatcctcggcaaaatgcaccaggacgccgcgccgccggacagcgtggaggtgttctgctatagccagcacctgcgcggcctgatccgcacccgcgtgcagcagatgatctccgaatgtatcgaactgcgtctctccagtacccgccaggataccgggcgcttcaaagcgctgcgcgtctccggccagacgtgggggctgttcttcgagcggcttaacgtttcggtgcagaagctggaaaacgccattgagttctacggcgctatctcgcacaacaagctgcacgggctgtcggtgcaggtggaaaccaatcacgttaagctgccggcggtggtggatggcttcgccagcgaagggattattcagttcttctttgaagacgcggataacaacgacagcggttttaacatctatattcttgatgagagcaaccgcgccgaggtctatcatcactgcgagggcagtaaagaggagctggtgcgcgacgtcagccgcttctattcgtcatcgcacgatcgtttcacctacggctccagctttatcaacttcaacctgccgcagttctatcagattgtcgaggtagacgggcgcacccaggtgatccctttccgcactcaggcgattgccgccgcgatacccaccagccaggacgttaccgcctcgccggtgctgcagcagcgctactcgtagatttggcccggagaaggcgtgagccgctatccgcagatattccctgctggcgctgcgcttagcagggctacggttctaagtcgtcgggtagcccggataaggcgcgatgcgccgctatccgggaaacacgtcattaacggaatttcaccgtctcaccggcctgctggctcgccgcctgctccagcagatcccagaaggtttcgccgctgcgatcgcagatccactcgtcgcctttgagatcgaagtgatagccgccctgtttggtggccagccacacctggtgcagcggctcctgacggttaataatgattttgctgccgttttcaaagctgatggtcagcacgccgccgttgatttcgcagtcgatgtcgctatcgccgtcccagtcgtccagacgttcttcgatggtcatccacaggctatcggccaggcgatggaattcactgtcgttcataatttgattctgcttttttgatttttgaagatgggtcgcagtatagcgcgaaacaaaagcgcgcgcagtcggatgctaaaggcttgcttttacgtcttctcctgcgatgatagaaagcagaaagaatgaatcacgggcaactatcaatgaaaaacgtttttcctacgcttgccgttttgtttgcgatcttcagcctgaccggctgcggtctgaaagggcctctctatttcccaccggcggacaaaaccgcgccgccgccgaccaaaccggttaaccctggcattcagagcgcaacgccggatcgtaacgatcgtggcgataccggtggtccgagccaggtcaattactaacgataacgttctgttccgcgcaactggagtagatgatgcagttctctaaaatgcatggccttggcaacgattttatggtcgttgacgcggtaacgcagaatgtttttttctcgccggagctgattcgccgcctggcggatcgccaccttggcgtcgggttcgatcagctattggtcgtcgaaccgccctacgatccggatctggatttccactaccggatctttaacgccgacggcagcgaagtgtcgcagtgcggcaacggcgcgcgctgttttgcccgcttcgtccggctgaaaggcctgaccaataaacgtgatatccgcgtgagtacggccaacgggcgtatggtattaagcgtaacggaagacgatctggtgcgggtgaacatgggcgagcccaacttcgagccgtcccaggtgccgttccgcgccaacaaagcggaaaagacctatatcatgcgtgccgccgagcagacagtattgtgcggcgtggtgtccatgggaaatccgcactgcgtcatccaggttgatgatgtggatacggcagcggtggaaactctcggcccggtgatggaaagccatgagcgttttccggagcgcgccaatatcggctttatgcaggtggtcggtcggtctcatatccgtctgcgcgtctacgaacgcggcgcgggggaaacccaggcctgcggcagcggcgcctgcgccgcggtggcggtggggatccagcaggggctgctggcggaaacggtacgcgtggaattacccggcggtcgtcttgatatcgcctggaaaggcccgggccagccgctgtttatgaccggcccggcggcccatgtctatgatggatttattcatttatgaaaccaatcggggaagaacagcaggaggttgccagcgcgttgaacgatcgcgcagtggtggactatctgttgcaacatcctgaattttttattcgtaatgccgcccaggtcgaacatctccgcgtcccgcatccggtacgcggtacgatttcgctggtggagtggcacatgatgcgggcgcgtaaccatattcatgtgctggaagaaaatatgtcgctgctgatggagcaggcggtcgctaatgaaagcctgttccagcgcctgctgcagctgcaaacgcggctggcggcggcggagagccttgacgatatgctcaaccgccttcaccgctgggcacgcgagctggggctggcgggcgccacggtgcgcctgtttcctgactgctggcgcctcggcgcgccctcgaagtttacccatctggcattaaaccggcaggcgtttgagccgatccgtattcaacgtctgggccaggcgcgccactatcttggaccgctgaacggcccggagctgctggtggtgctgccggaggcgaaggccattgggtctgtggcgatatcgctgctggggggcgataatgccccgggggtgatgctcttcagcagccgcgatgcgcagcattatcagccagggcaggggacgcagctgttgcaggagattgcccagatgctgcccggcctgctggagcgctggattgaacgcgcatgaccgattctcctctcttctccgccgtcgcccgctttcttcgccatcttggcgttgaacgccagctcagcccgatcacgttactgaattaccagcgacagctggacgcgctgatcgccctggcggatgaggcgggcctgaaaagctggtcgcagtgcgatgccgctcaggtgcgaagctttgcggtgcgtagtcgccgcgcggggttaggcccggcaagcctggcgcttcgcctgtcggcgctgcgcagtttcttcgactggctggtcggtcagggcgagctcagcgccaatccggcgaaggggattgccgcgccgaaaattccccgccacctgccaaaaaatattgacgtcgatgacgtcaatcgactgctggatatcgatctcaacgatccgctggcggtgcgcgatcgggcgatgctggaggtgatgtacggcgcgggattgcgtttgtccgaactggtcaacctggatatcaaacacctcgatctcgaaagcggtgaggtctgggtgatgggcaaaggcagcaaggagcgtcgtttgccgatcggtcgcaacgcggtggcatggattgagcactggctggatttgcgcggcctgttcggtaccgacgacgacgcgctgtttttgtcgaagctgggcaaacgtatttcggcgcgcaacgtacagaagcgattcgccgagtggggcattaagcaggggctgaacagccatgtgcacccgcacaagctgcgccactcctttgccacccatatgctggagtcgagcggcgatctgcgcggcgtgcaggagctgctggggcatgctaacctctccaccacccaaatctatacccatcttgattttcaacaccttgcctcggtgtacgatgccgcgcatccgcgcgctaaacgggggaaataatgcgtttttaccgacctctgggccagatttccgcgctgacgtttgacctggacgataccctttacgataaccgcccggtgattgaccggacgatgcacgagtcgctggcctttgtgcgcagctaccatccttcgctcagccagttcgacgcccatgagcttaatcagctgcgtcagacgctgctggctgctgaacctgagatttatcatgacgtgaccgtctggcgccaccgtgcgctggagttaggtatgcgtaatgccgggctctccgccgaagcggcgaaagcgggggccgatgcggcgatggaacacttcgcccactggcgcagccgcgtcgatgtcccgcaggaaacgcacgatacgctggcgaagctggcgaagaagtggccgctggtggcgattaccaatggcaacgcccgcccggaactgttcggtctgagcgactatttccgcttcgtgctgcgcgccgggccggatggccgctccaagccgtttgccgacatgtaccaccttgcggcggagcgtctgaatgtgccgctcgggcagattctgcacgtcggcgatgatctgaccaccgacgtggccggcgctattcgctgtgggatgcaggcctgctggatcaaaccgcaaggcgcggacctgatgcacaccgcggacagccgcctgctgccgcatattgaaatttcacggttggcatctctgacctcgctgatataatcaccagtcactctgtatatattaacaggggttcgtggaaccccttctcttccggcggtgccaatggacgtttcttacctgctcgacagccttaatgacaaacagcgtgaagccgtagcggcctcgcgcaccaatatgctggttctggcaggggcgggcagtggtaagacgcgcgttctggtgcaccgtatcgcctggctgctgagcgtggagaactgttccccgtattccattatggcggtgacctttaccaacaaagcggcggcggagatgcgtcaccgtatcggccagctgatgggcaccacccagggcggcatgtgggtgggcaccttccacggcctggcgcaccgtttgctgcgcgcgcaccatctggatgccaacctgccgcaggacttccaaatcctcgacagcgaagaccagctgcgtctgctgaagcgtctgattaaggcgatgaacctcgatgagaaacagtggccgccgcgccaggcaatgtggtacatcaacagccagaaagatgaaggactgcgcccgcatcatattcagagctacggcaacccggtcgagcagacctggcagaaggtctatcaggcctatcaggaagcctgcgaccgcgccgggctggtggacttcgccgagctgctgctgcgcgcccacgagctgtggctgaacaaaccgcatatcctgcagcactaccgcgagcgcttcaccaatatcctcgtcgatgaattccaggataccaacaacattcagtacgcctggatccgcctgctggcgggcgataccggcaaggtgatgatcgtcggcgatgacgatcagtctatctatggatggcgcggcgcgcaggtcgagaacattcagcgcttccttaacgacttccccggcgcggaaaccatccgcctggagcagaactatcgctcgaccagcaatattctcagcgctgccaacgccctgattgaaaacaacaacgggcgcctgggcaaaaagctgtggaccgacggcgccgacggcgagccgatttcgctgtactgcgccttcaacgatctcgacgaagcgcgctttgtggtgaaccgaattaaaacctggcaggagaacggcggtgcgctggagcaatgcgccattctctatcgcagtaacgcccagtcgcgcgtgctggaagaggccctcctgcaggccagtatgccgtaccgtatctacggcggcatgcgcttcttcgagcgtcaggaaatcaaagacgcgctctcttacctgcgccttatcgccaaccgcaacgacgacgcggcctttgagcgcgtagtcaatacgccgacccgcggcattggcgaccgcacgctggacgtggtgcgccagacgtcgcgtgatcgccagctgacgctatggcaggccagtcgcgagctattgaaagaaaaagcgctggccggtcgcgccgccagcgccctgcagcgctttatggagctgattgacgcgctggcgcaggagaccaccgatatgccgctgcacgttcagaccgatcgggtgattaaagactccggcctgcgcgcgatgtacgagcaggagaaaggcgagaagggccagacccgtattgaaaacttagaggagctggtgacggcgacgcgccagttcagctacaacgaagaagatgaagatctgatgccgctgcaggcgtttctctcccacgccgcgctggaagcgggcgaggggcaggcggacacctggcaggacgcggttcagctgatgaccctgcactcggcgaaagggctggagttcccgcaggtgttcatcgtcggcgtcgaagaagggatgttcccgagccagatggccctagatgaaggcggccgcctggaggaggagcgtcgcctggcctacgtcggcgtaacgcgcgccatgcagaagctgacgctgacctatgcggaaacccgccgtctgtacgggaaagaggtttatcaccgcccgtcgcgctttatcggcgagctgccgcaggagtgcgtagaagaagtgcgtctgcgagccacggtgagccgcccggtaaaccatcagcgactgggcgcgccgattgccgagagcgataccggctacaagttaggccagcgcgtacggcatccgaagtttggcgaaggcactattgtcaacctcgaaggcagcggcgagcacagccgactgcaggtggcttttcagggccagggaatcaaatggctggtggcggcttacgcccggctggaggcagtgtaactttaagaaaaatatcattattttgtaatattctgctacctttatacgttaaggcgcctgatttgcgctttcgcgttccgttgcgtgttgacgccgattttgcgctggcgtaacatgcgcgcacgattacgctaagaggacattcgccttggacacacccagtagatgctggctcaacttcctgtcattcaggaacaactcctaaggctatcctcttatgctgatagccttagcggttgtcagcgacctgccccattcccgtcgcgctgagtcaggcttaatggtctgaaacccaatttgtttctgtgtgcccaccgaactgtccgataatttttttgcattgggagtcccggtcatgctgagcgcatttcaactggaaaacaatcgtttaacgcgcctggaagccgatgagatcaaacacctcgccagctcggtgtgggtcgatctggtcgagcctgacgacgatgagcgaagccgcgtgcagacggaactgggtcaaaacctggcgacgcgcccggaactggaagatatcgaagcctccgcgcgtttctttgaagatgaagacgggttacacatccactcgttcttcttttttgaagatgccgacgatcacgccggcaactctaccgtggcgtttaccatccgcgaaggccgcctgttcacgctgcgcgagcgcgaactacccgctttccgcctctaccgtatgcgcgtgcgtaaccagacgctggtcgacggcaacgcctacgaactgctgctcgacctgttcgagaccaaaatcgagcagctggcggatgaaattgaaaacatctacagcgacctggaaaagctgagccgcgtcattatggaaggccatcagggcgacgagtacgacgaagcgctgtcgacgctggcggaactggaagatatcggctggaaggtgcgactctgtctgatggatacccagcgcgcgctgaacttcctcgtgcgcaaggcgcgcctgccggcgggccagctggagcaggcgcgggagatcctgcgcgatatcgaatctctgctgccgcacaacgaatcgctgttccagaaggtgaacttcctgatgcaggcggcgatgggttttatcaatatcgagcagaaccgcatcatcaagatcttctcggtggtctcggtggtattcctgccgccaactctggtggcctccagttacgggatgaactttgaatttatgcccgaactacactggagctttggttatccgggagccatcgtgtttatgatgctggccggcctggcgccatatctctacttcaagcgcaaaaactggttgtaaaaaagggagcgtcggctcccttctttactggctgatgcaggcttagcctctgcgcaaccggcgctgggtatacagcgcatcgacgataaacaccgccagcgcgacccagataaagccaaaggtcaccattttatccttgcccggcacttcgccgtagaacgtcaccgccagcaggaacatcagcgttgggccgatgtactggaaaaagcccagcgtggagagccgcagacgcgttgccgccccggtaaagcacagcaaagggatggtggtcaccacgcccgcggccatcagcagcagattgagcgaccaggggttctcgcccatatggctggtcgggctgtcggtgatgccgaacaaccagattgccgccaccggcagcagccacagcgtttccaccagcatgccggtttgcgcatcgacagcaattttctttcgcaccaggccgtaaaaggcaaaactgaaagccagcccaagaccgattatcggcagcgaaccaaaggtccacagctggaccagcacgccgcaaaaggcgaggatcaccgccagccactgcagacgacgaaagcgttcgccgaggaaaatcatccccaacaaaatattcaccagcgggttgataaagtagccgaggctggcttccagcatatggtggttattcaccgcccagatgaacaacagccagttaccgccgaccagcactgccgagagcgccagcaggaagatcttgcgcggcgttttcagcagctttttcacctgtggccactggcggctgacgctgatgagcgccaccatgaagaagaaagaccagatcacgcgatgggtcagaatttcatcggcgggaacatagtagataagtttgaagtacgctggcgcgataccccagataaagtaggcggcgagggccagaatgatccccaaccgcgtctgtttcgcatccatcggtaaaatccattgccaaagagagtgatgttactcgattttggccaatcaacccaccatataggtggccgttgcgctggcaatatagacctgagcttcgttatgcagttccacgcgggcaaccgccactttattgccggcgcgcagcagggtgctggtggcggtaaaacgttcgccgcggcccggacgcaggtagtccacgcgcaggtcgatggttcccatacgggaaagccgctggcgcaactcttcttcgttgatggtgtcatggcgggtaagggtactgccgacgcagaccaggccagcggcaacgtccagcgcggaggcgatcaccccgccatgcagaatgctttgcgcccagttgccgaccatcatcggctgattattaaagctaagctgggcaaacgctttttcgtagcgttccagttcgagaccgagggcgcggttaaacggcatgtgatagacgaaaatctcccctaccagtttcagggctgcttcggcagtaagttcagacataacaccggttccattcgttaataaaatgttgattttatgcttctaaaatattgatttccactttcggagcggattagggggcaggtgattaataaacaggtagaatggcttcaggttaaacaaaaataaaaactatttttcaggagaccagcatgcgtatctctttggcctgcctggtggcgctgtgcgcgctaccggccggtgttatggcgcaggacgcgtcggtacacgacaaaccggcagtgcgcggcagcattatcgccaacctgctccaggaccatgataatcctttcctgctctacccttatgagagcaactatctgctctatacgtggaccagcgacctcaataaagaggcgatccgcagctatgactgggccgaaaatgcccgtaaagatgaagtgaagtttcagctaagcctggcgttcccgctgtggcgcggtatcctgggcgataattcgctgctgggcgcgtcctatacccagaaatcctggtggcagctctctaacagcaaagagtcggcgccgtttcgcgaaaccaattatgaaccccagctgtttttgggctttgcgaccgactaccagtttgccggctggacgctgcgcgatatcgagatggggtataaccacgactcgaatgggcgttccgaccccacctcgcgcagctggaatcggctttatgcccgcctgatggcgcaaaacggtaactggctggtggaagtgaagccctggtatgtggtgggcaacaccgatgataacccggatatcaccaaatatatgggctattaccggctgaaggtgggctaccagctgggagaggcgatcctcagcgcgcaggggcaatacaactggaacaccggctacggcggggcggaacttggcgtgagctatcccattaccaaacatgttcgcgcctatacgcagatctacagcggctatggcgagtcgcttatcgactataactttaaccaaacgcgcgtcggcgtcgggctaatgctcaacgatctgttttaatcgttgcactctggctcgcaggcgctgaaaatagcgcctgttttcttttcaggcaaatggggtcaacgtggcacaggcggaagtattgaatcaggaatcgctggctaagcaggttttacaagagaccttcggctaccagcagttccgtcctggccaggaaacgattatcgagacggcgctcgaaggccgggactgcctggtggtcatgccgaccggtggcggcaagtcgctgtgctatcaggtgccggcgctggtcatgggcggtctgacggtcgtggtctcaccgctgatctcgctgatgaaggaccaggtcgatcagctgctggccaacggcgtggcggcggcttgtctgaactcgacgcaaagccgcgagcagcagcaggaggtgatggccggctgccgcagcgggcaggttcgtctgctgtatatcgcgccggaacggctgatgctggataactttcttgagcatctggcgaactggaacctggcgatgctggcggtagacgaggcgcactgtatctcgcagtggggccatgacttccgtccggaatatgccgcgctgggccagctgcgtcagcggatgccgcagatcccgtttatggcgttgaccgccaccgccgatgataccacccgccgcgatatcgtccgcctgctggggcttaacgatccgctgattcaggtcagcagcttcgaccggccaaacatccgctatatgctgatggagaaattcaagccgctcgaccagctgatgcgctacgttcaggatcagcgcggcaaatcgggcattatctactgcaacagccgttcgaaagtggaagacaccgccgccaggctgcaaagccgcggtattagcgcggcggcttaccatgccggtctggaaaacgacgtgcgcgccgaggtgcaggagaaattccagcgcgacgatctgcagatcgtggtggcgacggtggccttcgggatgggcattaacaagccgaacgtccgctttgtggtgcattttgatattccgcgcaatattgaatcctactatcaggagaccggccgcgccgggcgtgatggtctgccggcggaagcgatgctgttttacgatccggcggatatggcgtggctgcgccgctgtctggaagaaaaacccgccgggccgctacaggatatcgaacggcataagctgaatgcgatgggggcgtttgccgaagcgcagacctgtcgccgtctggtgctgctgaactattttggcgaagggcgtcaggagccgtgcggcaactgcgatatctgtcttgacccgccaaagcagtacgatggcttaatggatgcgcgcaaggcgctttcaacgatttaccgggtcaatcaacgtttcgggatgggttacgtggtggaggtcctgcgcggggccaacaaccagcgcatccgagagatgggccacgataagctgccggtttacggtatcggccgggagcaaagtcacgagcactgggtgagcgtgatccgccagctgatccaccttgggctggtgacgcagaatatcgcccagcactccgcgctgcagctgaccgaagccgcgcgaccggtgctgcgtggcgaagtgccgctgcagctcgccgtgccgcgtatcgtggcgctgaagccaaaggcgatgcagaaatcctttggcggcaattacgaccgtaaactgttcgccaagctgcgcaaattacgtaaagcgatcgccgacgaagagaacatcccgccatatgtggtcttcaacgacgcgacgcttatcgagatggccgaacaatcgccgctgaccgccggcgaaatgctcagcgtcaacggcgtggggacacgcaagctcgagcgtttcgggaagccgtttatggcgctgatccgggcgcatgttgatggcgacgatgagtagtcagctggctgaaaaagtgccagaatagtttctctcttcattattttcctgcgagttaactatgctgatgcttttcctcaccgtggcgctggtgcatatcattgcgctgatgagcccggggccggactttttctttgtctcacaaacggccatcagccgctcgcgcagagaggcgatgatgggtgtgctggggatcacctgcggcgtcatggtctgggcgggagtggcgctgctcggcctgaacctgatcctcgcccggatggcgtggctgcataacattataatggtcggcgggggcctgtatctatgctggatgggctaccagatgctgcgtggcgcgctgaaaaaagagaaggtggcctcggcggagccgcaggtggagctggcccgcagcggacgcagcttcgtgaagggattgctgaccaatctggcgaatccgaaagcgattatctacttcggctcggtgttttcgctgttcgtgggtgacagcgtcggcgccggcgcgcgctggggcattttcctgctgattatcgttgagacgctggcctggtttatggtggttgccagcctgttcgccctgccggggatgcgccgcggctatcagcggatggcgaagtggatcgacggtatcgccggtacgctgtttgcgggcttcggcatccacctgattatctcgcgttaaccggcatgctgtttcccacccggttgtttccgggtgggaaagtatcagtggcgaagccgctgcagctcgtcttcagacagaccggtcatttccataatcgcctggtcatcaataccgcgactgcgcatcgcttcggcaacctgcaccagagcctggtgtttaccttcttttatgccctgctgtacgcctttctccataccttctgcaagccatgtttccgccagcgtcatcagtaatcctccatgctgcggcacgcgctgtgccagcccgtacaagagtgtccgagtatcttcggcatcccctgcctgagccatatagtttaccaatacggtgatttgttgtccgctcatctgctccagcattaagagttgggtcaacttatccagcaattgcgccatatcgcgctggcggatgtgcttttgcaccagcgtcagggctgccatgctgcggtgctgcatgatgtcgtcgtcggggatcaccgtgatatcgaccagcggaaacgccccgctatacagctggctggcggtctcaggatcggcaaaattatccagccagcgcatcgaccagggataggggctgcgtcgtccctgatagaagagaatagggataaccagaggcagcgttttatggccgctctccaggtgccgctgcatggcggcgatggcatagcgcattaagcgaaaggccatcagcttatcgggtgcgctctggtgctcgatcagaacatggacatagcccgcaccgcgggtggtttccagcgaataaaggatatcgctgtagtaaggtctgagatcgtcttcgagaaagctgccggattccagacgcagggtgtccagtttgcagatctgtgttaacgacggaggcaggtggagctcgataaaatcgcgcgccgtctctacccgtgagagaaaagttttaaatactgcatcatgaggggtcgccgtttccgccattgccgttcatccgtgaatcacgtatctggcggcatcctgacatggcgggttcagcgccgacagcgggcaaaaaaattaattacccactttgcgcgccggctcgcgcagagagaaagcgtcgttcacctggcgaacctctctttgcgagcgagattccatgattcaggcatggcgggcggaggcgagcagcgccccgaccagcataaacagtgaaccaaagactttgttcaacgccttcatctgctttggccctttgatccatgcggaaatgcgctgcgccagggtcgcatagccaatcatcacaatgatatcgacgacgatggtggtgacgcccagaacgagatattgcatcacctgcggctggtgcggcaggataaactgcggaaacagggcggccagaaaaacaatgcttttgggattggtgagatttacgaacaccgcgcgctgaaacagtttgccgcgcgtctgcgccttcgccagcgtattcaggtcgatcgcccctgccgcccgccattgctggatacccagccagatcaggtaggcggcgccggcccattttagcacctcaaaggccagcaccgagcgggagaagagagtgccgagaccaacgccaaccagcacgatatgaatggccagcccggtctgcaaaccggcaatcgacgccgccgcgccgcggtatccgtggttaatggaagtggtcatggtattaatcgctccggaacccggcgacaggctgagaataattgatgtcagcaggtaggcgaaccaccactcaatggtcatgagaaactccctgattgtctgtttttatgccacaatacgctattgtgtcagcattgtgtgatacacggtaaaaaaacgattttcagcggttaacaggggtgtaaacccgatgtttgggcagaaaaaggactgggaaacacgagaaaacgcgtttgcggcctttagcatggggccgctgacggatttctggcgacagcgcgaagaagctgaatttaaaggcgtcgacgatgtaccggtacgctttgtccgcttttgcgcgcaacataacgatcgtctggtgttgatttgccccgggcgcattgaaagctacgtgaagtatgctgaagtggcctacgatctctttcactgcggctttgacgtgatgatcattgaccatcgcgggcagggacgctcgggccgcctgctctcagatacccaccgcggacacgtggttaacttcagcgactatgttgatgacctggccgcgctctggcagcagcaggtggttcccggacactggcgaaaacggtttatccttgcccattctatgggcggagcgattgccacgctttttctgcaacgttaccgggcgcattgcgatgcaatagcgctctgcgcgccgatgttcgggattatcattcggctgccggactggatggtgcgccatattctcgactgggctgagggccatcagcgcattcgcgaagagtatgccatcggcaccgggcgctggcgggcgctgccttttgccgttaacgtgctgacgcacagtcggcaacgctatcgtcgcaacctgcgcttctatgccgatgagccgcggctgcaggtcggcggtccgacctggcactgggtgcgtgagggcatgctggccggcgacgaagtgctggcgaatgtggaaaaagataccgccccgacgctgcttttacaggcggaggaggagcgggtggtcgataatctgatgcacgaccgctattgcgaattacgggccgctgccggccatccttgtgagggcggtaaaccgctcgtcattgaaggggcatatcatgagatcctttttgaaaaggacgctatgcgctcagtcgcgctcaatgccatcgtcgagtttttcaatcgacatacttaatccgacgataacgctcgtcgccctgcttagaggttaacttttttatgtaccaggttgttgcgtctgatttagacggcacgctgctttcccccgatcatttcctgaccccgtatgccaaagagacgctgaagctgcttaccgcccgtgggatcaatttcgtcttcgccaccggccgtcactacatcgacgtcgggcaaatccgcgataatctcggcatccggtcgtacatgatcacctctaacggcgcccgcgttcacgatagcgatggtcagcaaatctttgcccataacctcgatcgcgatattgccgccgacctgtttgagatcgtgcgtaacgacccgaaaatcgtcactaacgtttatcgggaagacgagtggtatatgaaccgccatcgtccggaagagatgcgcttcttcaaggaggcggtgtttaactacaagctgtatgagccgggcgaactggatccgcaggggatcagcaaagtattctttacctgcgaggatcatgagcatctgctgccgctggagcaggcgatgaacgcccgctggggcgatcgggtgaacgtcagcttctccaccttaacctgcctggaagttatggcgggtggggtatcgaaggggcatgcgctggaggcggtggcgaagatgctcggctacactctttccgattgcatcgccttcggcgacggtatgaacgacgctgagatgctgtcgatggctggcaaaggctgcatcatggccaacgcccaccagcggctgaaggatctgcatccggaactggaagtgatcggcagtaacgccgacgatgctgtcccgaactacctgcgtaagctatacctcgactgaaaaagattgacgactggcgaataagtgtccagtcgtcaacctgactcttcgctacaatgcctgttctttatccaacgagacgaccattgtggcgctgttaattatcaccactatcctgtgggccttttcttttagcctgattggcgaatacctggccggtagcgtcgacagctatttttcggtgctgatgcgcgtgggcctggcggcgctggtgttcctgcctttcctgcgcacgcgcggccagtcgccgcgcacgatcgtgctctatatgctggtgggcgcgatgcagctaggcatcatgtacctgctggctttccgcgcctatctctatctgacggtctcggaatttctgctgtttaccgtgtttactcccctgtatatcacactgatctacgacctgctcagcggacgtaagctgcgctggggctatctgctgagtgccgcgctggcggtgctgggggcggcgattatccgctatgacaaagtcagcgatcatttctggaccgggctgttactggtacagctgtcaaacctctgcttcgccatcggtatggtggggtataagcgtctgatggaggtgcgtccgatgccgcagcacaatgcctttgcctggttctatgtcggggcctttatcgtggcggtggcggcgtggtttatgctcggcaacgcccagaagctgccgaccaccacgctgcagtggagcgtgctggtgtggctcggcgtggtggcttccgggctgggttactttatgtggaactatggcgccacccaggtggatgccggcacgctggggatcatgaataacgtccatgtccccgccgggctgctggttaaccttgccatctggcaggagcagccgcactggccgagctttattagcggagcgttggtgatcctggcctcgctgtgggtccatcgccgctgggtcgctccgcactccggacaaacggcagatgatcgcaggcgtggttccgcgcagagcgaataaacgcttcggtgaccggttgacgctgttcgccatcgcgaacggccgcgtacaaccggctccataacccctcacccagggttttggtgaccaccaggccctggcgttcaaagctttccaccacccagtgcggcagcgcggcgatgcccatccgggcagccaccatctggatcaacaacagcgtgttatcgacgcttttcagctgcgggctgatgccggccggctgcaggaagtggcgccagatatcgaggcgcccgcgttgcacgggataaatcaacagcgtttccgcggccagatcctccggggtaaccagcgtcttcatagctaacggatgctcgggcgccagcaccagacgcacctcaaaatcaaacatcggcgagtagtgcaggccgctgcgcggcagaatatcggaggtcatcaccagatccagttcaccctgctgcagcgcaggctgtgggtcgaaggtgacgccggaatggaagtcgacctccacatgtggccagcgggcgcggaaattctccagcgccggcgtcagccactgaatacagctgtgacattcgatagccagcctcagccgggtctgctgtggttcgttacagtcctgcagggcgcgagcgatctgcggcagcacctggttggccagctgtaagaggatttccccctgaggcgtaaaacgcagcggctggctcttacgcacaaagagacgaaagccaaggcgctgttccagatcgctgaactggtgagacaaggcggactgggtctggtgcagggccgctgccgcacccgccagtgaaccgctgttccgcaacgcttgcagcgttttcagatgtttaatttcgatcatgaaagtccttcacttcgccatgagcaatttgcgcttgaggaatatacagtaactgtcaattatggatgtgtaaacatctggacgtctaaaactcgtcatatttcgacttgcagatgcgttggctgccttgcttaccccagtcacttccttcagtaagctcctggggatgcgcatcgttgccgccttccggcaagccgaactattgagattttttcttcagattcaatgaaataagagaggaacaaaaatgacaattattaaccacaccctcggttttcctcgcgttggcctgcgccgcgagctgaaaaaagcgcaagagagctactgggcgggcaacgccactcgcgaggaactgctggcggtaggccgtgagctgcgcgcccgtcactgggaacagcagaaacaggcgggcgttgatctgctgccggtgggggatttcgcctggtacgaccatgttctgactaccagcctgctgcttggcaacgtgccggctcgtcatcagaacaaagacggatccatcgacatcgataccctgttccgcattggccgcggccgcgcgccgactggcgaaccggccgccgctgcggaaatgaccaaatggtttaacaccaactatcactatatggtgccggagttcgtgaagggccagcagttcaaactgagctggacccaactgctggatgaagtagacgaagcgctggcgctgggccacaagatcaagcccgtgctgctggggccggtaacctatctgtggctgggtaaagtgaaaggtgaaccgtttgaccgcctgaccctgctgaatgccatcctgccggtttaccagcaggtgctggccgaactggcgaagcgcggcatcgattgggtgcagattgatgaaccggcgctggtgctggagctgccgccagcgtggctggaggcctttcaaccggcttatgacgccctgcagggccaggtgaagctgctgctgactacctattttgaaggcgttagcgacaatctcgcgaccattgctgcgctaccggtccaggggctgcacgtcgatctggtgcacggcaaagatgatgttgccgaactgcacaaccgcctgccggccgactggctgctgtccgcgggcttgatcaatgggcgtaacgtctggcgcgccgatctcaccgaaaagtatgcgcaaattaaagacctcgtcggtaagcgcgagctatgggtcgcgtcatcctgctctctgctacatagcccgatcgatctgagcgtggagacgcgccttgatgcggaagtgaagagctggtttgccttcgcgctgcagaaatgcggtgagctggcgctgctgcgcgatgcgctgaacagcggcgatacggcggcgattaccgagtggagcgcgccaatccaggcccgtcgccattcgacccgcgtgcacaacgcggaggtggaaaaacggctggcggcgatcactgctcaggacagccagcgcgccagcccctatgaggttcgcgcgcaggcacagcgccagcgctttaacctgccgaaatggccgaccaccaccatcgggtcattcccgcaaacgaccgagatccgcggcctgcgcctggacttcaaaaagggtaaccttgacgccagtcattatcggacggggattgcggaacatattaagcaggcgatcgtcgagcaggagcggttaggtttagacgtactggtgcacggggaggccgagcggaacgacatggtggaatacttcggcgaacatctggacggttttatcttcacgcaaaacggctgggtgcagagctatggttcccgctgcgtgaagccgccggtggtgatcggcgacgtcagccgtccgcaggcgatcaccgtcgactgggcgaagtacgcgcagtccctgaccgacaagccggtgaaagggatgctcactggaccggtgaccattctgtgctggtccttcccgcgggaggatgtcagccgtgaaaccatcgcgaaacagattgcgctggccctgcgtgatgaagtggcggatctggaggcggcggggatcggcatcatccagattgatgagccggcgctgcgcgaagggttaccgctgaagcgcagcgactgggatgcctatctgcagtggggtgtggaagccttccgccttaatgctgcggtcgccaaagacgacacgcagatccatactcacatgtgctattgcgagttcaatgacatcatggactccattgccgcgctggacgctgacgtgatcaccattgaaacctcgcggtccgatatggagctgctggagtcgttcgaagcgttcgagtaccccaatgagatcgggccgggagtatatgatattcactcgccaaacgtgccgagcgtggagtggatcgaagcgctgctgaagaaagccgcgcagcgtatcccggtggagcgactgtgggttaacccggactgcggcctgaaaactcgcggctggccggaaacccgcgccgcgctggcgaatatggtgcaagcggcgcgaaatctgcgccagtccgcctaatcgttacgcgaaaaatcaaaaaggaggcatttgcctccttttttcatgcttagggcgattacccttttttaccgccatactgagcaaaccaggcgagcatccgctgccagccgtctttggctgactcttcatgatagctggcgcgatagtcggcgttaaaggcatgatcggcttcgggatagaccacgatttccgccgtggcgttggctgcccgcagcgcctgacgcatagtctcgacggtgtcctgcggaatgctggcgtctttagcgccgtacagaccaagcaccggggcgttgagatcgacggcgatatctaccgggtgcttcggcgaattcagtgatttttctcccaccagcttaccgtaccaggccactgccgctttaagctgcgggttatgcgcggcatacagccaggtaatgcgtccgccccagcagaagccggtgatcagcagacgatgggcatcgccgccgtggcgcgccgcccagctggcgacgtggtcgagatccgccagcacctgcgcgtccggcaccttgctgaccagctctttgaacagggtcgggatatcgtggtactcattcggatcgccctgacggaagtacaattcaggcgcgatagccagatagccttcctgtgccaggcggcgacaaagatcgcgaatatgttcatgcacgccgaaaatttcctgtaccacgataacgatcggcagcggaccgtcggcatttttcgggcgggcgtggtaggccggcatgttttcaccctgagagggaatcgacgtctctccggcgataatatgctcttccggcgtatgaacggcggttgcggcgtgtggtgaagctgcaggtgcgaatccaggttgcttggtggtggtcatggtattctccgtacccttatttattagcgcatcagtaactatagaccctttacctttagttcgggcggtaataaagcacagtgcctgaaagcggctatcttttgttctgtgatgatgaatataacttgttaatgtgatgtgcatcactatttactgaaaaacaactgcaaccattattggtcttggtgactatcatcacaaaatgttgccaggggcttctgtacagtaccgttttgcttctgctgataattcgacccacagaggagttttttatgtccaagtctgatgtttttcatctcggcctcaccaagaacgatttacaaggggctacgctggctatcgtccctggcgatccggagcgtgtggaaaagatcgccgcgctgatggataagccggttaaactggcatctcaccgcgaatttacctcctggcgcgcggagctggacggcaaaccagtgatcgtctgctctaccggcatcggcggcccgtcgacttccatcgccgtggaagagctggcgcagctgggggtgcgtaccttcctgcgtatcggcaccacaggtgcgattcaaccgcacatcaacgttggcgatgtgttggtgactaccgcctccgttcgtctggacggcgccagcctgcacttcgcgccgatggaattcccggccgtcgcagacttcgcctgcaccaccgcgctggtggaagcggcgaaatcaatcggcgccaccacccatatcggcgtaaccgcttcctcggataccttctacccgggccaggagcgttacgacaccttctccggccgcgtcgtgagccgcttcaagggctcaatggaagagtggcaggcaatgggcgtgatgaactatgaaatggaatccgccacgctgctgaccatgtgcgccagccagggcctgcgcgccgggatggtggctggggttatcgtgaaccgtacccagcaagagatccctaacgccgaaaccatgaagcaaaccgaaagccacgcggtgaaaatcgtcgtggaagcggcgcgtcgtctgctgtaactcaacactttccctgtcaggccggatcctccggcctttcttttttgcgtcgcctctcgcaggaaattccttttaaactggacgtttgtacagcacaattctattttgtgtcatcaggttatcgcagggggcgtcgtggatctctccattattatcagcgcggttatcgcactggcagccgggttaatggtcggctggctggcgaccaaagcgcgcgccgatcaaattcgggccgatctcatcgaggaacggcgagagttggatattgagctgagcgccgcccgccagcaactggcgcaggaggcccactggcgtgaggagtgtgagctgctgaacaacgagctgcgcagcctacgggatatcaatacctcgctcgaggccgatctccgtgaggtcaccacccggctcgaatccacccagctgcatgcggaagataagatccgccagatgatgaacagcgagcagcgccttagcgagcagtttgaaaacctcgccaaccgtattttcgaacacagcaaccggcgggtcgatgagcaaaaccgccagagcctgcatggcctgctgacgccgctacgcgaacagctggacgggttccgccgccaggtgcaggagagctttggccaggaggcgcgtgaaagacataccctggcgcatgagatccgcaatctgcagcagttgaacgcgcagatggcacaggaggcgctgaacctgaccaaagctctgaagggggataacaaaactcagggcaactggggggaagtggtcttaacccgcgtgctggaggcctccggcctgcgcgaaggctatgagtaccagactcaggtcagtattgagaccgacaaccgctcgcggatgcagccggacgttatcgtgcgcctgccgcagggtaaggacgtggtgatcgacgccaaaatgaccctggtcgcctatgagcgctatttcaacgccgaagacgactacacccgcgaagtcgcgctgcaggaacaccttgcctcggtgcgtaaccatattcgcctgctgggacgcaaggattatcaacagctgcctggcctgcgctcgctcgactatgtgctgatgtttattcccgttgagccggcgttcctgctggccatcgatcgccagcctgagctcatcagcgaggcgttgcaaaataatattatgctggttagcccgacgacgctgctggtagccctgcgcactatcgccaatctgtggcgctatgagcaccagagtcgtaacgcgcaaaagattgccgagcgggcggggcgcctttacgacaaaatgcgcctgtttgtggatgatatgtccgccatcggccagagcctggataaggcgcaagagagctatcgccaggcgatgaaaaagctcgcttccgggcgtggcaatctgctggcccaggcggaggcctttcgcggcctgggcgtggaggtcaagcgcgggattaatcctgatttagtcgaacaagctacggctcaggacgagcaatatcgtctcgaagatgaggataacctgccggaaaatgacgcattttcacccgactctgccgagacggtgcgtagccgggaggcggctccgccacgctgaaacgtatgggaaatgcgctgagtctgatacactcagtgaacattttcttgaaaagcaagcaggcatagagatggttgaggattcacaagaaacgacgcactttggctttcagacggtcgctaaagagcagaaagcagatatggtggcgcatgtattccattctgtcgccgcaaaatatgatgtgatgaacgacctgatgtcgtttgggatccatcgtttgtggaagcgtttcaccatcgactgcagcggcgtacgtcgcgggcagaccgtgctggatctggctggtggtaccggtgatttgacggccaagttctcccgcctggtaggggaaaccggccgcgtcatgcttgctgatatcaatgattctatgctcaaaatgggccgcgaaaagctgcgcaatatcggcatcgtaggcaacgttgagtatgttcaggccaacgcggaagccctgccttttgctgataatacctttgactgcatcaccatctctttcggtctgcgtaacgtgaccgacaaagagaaagcgctgcgttcgatgtatcgcgtgctgaagccgggcggacgtctgctggtgctggagttttctaaacccattatcgaaccgctgagcaaagcctacgacgcttactccttccatatcctgccgaaggtgggcgagctggtggcaaaagatggcgacagctatcgctacctggcggaatctattcgtatgcatccggaccaggaaaccctgaaagggatgatgcaggatgcgggcttcgaaaacgtggattactacaacctgacggcgggtatcgttgctttgcatcgcggttacaagttctgacaggagggacgctatgcctttcacacccctggttaccgctggcattgaaacggcgctgaatactttcctctggcgcgacaaagcgcttaaacccgctcgccagcgcctgctgggcaaggtattgcgggtccagctgcaggatttcgccacgcccgtggtgctggtattcagcgaacgccaggttgacgtcctgagcgcctgggacggagaggccgattgcaccgtgattacccggctcagcgtgctgccaaaactgcgcaatcgtcagcagctcacggcgcttattcgcagcggtgatctggaagtgcagggcgatctgcaggtggtgcagaatatggtctccctgtgcgacctggcagagtttgatcccgctgaactgctggcgccctataccggcgatattgtggccgaaggcgtcggtaaagtcctgcgcggcggcgctcagtttctgctgaagggcgcagagcgccagcagcgctatgtcgcggaagcgatcactgaagagtggcgcctggcgccggggccgctggagctggcctggtttgctgaagagacaacggctattgagcgcgcgctggccgcactggaaaaacggctggaaacgctggagggcaaatgacgccaggagaattacggcgcctgtatttcatcatccacacctttttgagctacgggctcgatgagctcatccccaaaatgcggatcacgctgccgctgcgtatctggcggcggatgctgttctggatgccaaaccgccatcaggatcagcctcttggcgcccgccttcggctggcgctccaggagctggggccggtgtggataaaattcggccagatgctttccacccgccgggatctctttccgccgcatattgccgatcagctagcgctgttgcaggaccgcgtggcgccctttgaagggaagctcgcgcagcagcagatagagaaagcgatgggggggctgccggtcgagacctggtttgatgatttctccgttgagccgttagcctcggcgtccatcgcccaggtgcataccgcgcgtctgaaggagaatggcaaagaggtggtgatcaaggttatccgcccggatattttgccgatcattaaagcggacatgaagctcatctaccgcctggcgcgctgggtaccgcgtctgctgcctgacggtcgtcgtctgcgcccgcaggaggtagttcgtgaatatgaaaaaacgctgctggatgagctgaacctgctgcgggaatccgccaacgctattcagctgcggcgtaatttcgaagacagcccgatgctgtacgtgccggaggtgtaccccgactactgcagcgaaagcatgatggtaatggagcgcatttacggtatcccggtgtccgatgtggaggcgctggaggcccagggcaccaatatgcagctgctggcggagcggggcgtgcaggtcttcttcacccaggtgttccgcgacagcttcttccatgccgatatgcatcctggcaacatattcgtcagctacgagcatccggaagatccgcagtatatcggcatcgactgcggtattgtcggctcactgaacaaagaagataagcgctatctggcggaaaactttatcgcctttttcaaccgcgattatcgtaaagttgccgagctgcacgtcgattccggttgggttccgcccgataccaacgttgaagagtttgagttcgcgatccgcacggtctgcgagccgatctttgagaagccgctggcggagatctccttcggccacgtgctgcttaatctgttcaataccgcgcggcgtttcaatatggaagtccagccgcagctcgttttactacagaagacattactttacgtagaaggggtaggccggcagctctatcctcagttagacttgtggaaaacggcgaagcctttcctcgagtcgtggatcaaagatcaggtcggcattccggcgctggtgcgcgcgtttaaagacaaagcgccgttctggatcgaaagaatgccggaaatacctgagctggtgtatcagagcctgcagcagagcaaacagctgcagaccagcgtcgatactattgtgcgggatatgcgtgtgcgtcatgtgcgccagggccaatcccgttacctgtttggtataggcgcggttttattgctcagtggtacgctgctctttatccatcgccctgagtggggaatgatgcccggttggctgatggccggcggtgtggtgacctggcttattggctggcggaaaacccactgatcggttcgcctcttcatgacgcaggcttatttgcgcaaaatcatgtcggcggcctgacgaagaggcggctcgcaggatggcgtgtataatgcgtccacacaattcatcatctgtcataggggaacgtgtatgggtggtatcagtatttggcagttattaattgttgtcgtcatcgtagttctgctttttgggacgaagaagctgagctcgctggggtctgacttaggggcatctatcaaaggctttaaaaaagccatgagtgatgatgataaacccgaaaagtcggcgccagacgcagatttcacggcgaaaaccatcgccgataaacaggatgatgcaaaaaaagacgagacaaaacgccacgacaaagagcaggtgtaactcgtgttcgatattggttttagtgaactactgctggtgtttgtgattggcctcattgttctggggccacagcggcttcccgtagcggttaaaacggtagttggctggatccgtacgttacgctcgctggcgaccacggtacaaaatgagctggcccaggagctaaaactgcaggagttccaggagagcctgaagaaggtggaaaaggctagcctgaataacctgacgccggagctgaaagcctcgatggatgaactgcgcgaggccgcggagtcgatgaagcgctcctatagcgcccacgatcccgaaaaagccagcgacgaagccaataccatccttaatccggtggtcaaaggcagcgaagcgcagcgccaggacgtcacgccggcgacggcagaacatcaggccagcgctccggctcatgcgccagatcccgttgccgacgagcaatctgcttcaccggctgaccttcaggcagagaaaacgtccgctacggcggcagttccccattcttcccccgcatcgagtgataaaccgtaaacatgggcgtagacgatacacaaccgctaatttcgcatctgattgagctgcgcaagcgtctgctcaacagcatcattgctattctggtgatcttcctggcgctggtctatttcgccaatgatatctaccagctggtctcggccccgcttatcagtaagatgcctgtgggcgcgacgatgatcgccaccgatgtcgcttcacctttctttacgccgataaagttgaccttcatggtgtcggtgatcctgtcggtgccgattattctttaccaggtatgggccttcgtcgcgccggcgttgtataagcacgaacgccggctggtggtgcctttactggtatccagtaccctgctgttctatatcggcatggctttcgcctattttgtcgtgtttccgctggcgttcggcttcctgacccatgcggcgccggaaggggtgctggtctcgaccgatattcgcagctatctcgacttcgtgatggcgctgtttatggcattcggggtctcctttgaggtgccggtcgccattgtgttgctctgctggatgggcgttaccacgccggaagacttgcgtaaaaaaaggccgtatgtgctggtgggtgccttcgtggtgggcatgctgctgacgccgccggacgtattctcgcagacactgctggccattccgatgtactgtctgtttgaagtcggggtgttctttgcccgcttctacaccgggaagcgcctgacgcgcgatgacgacgccgcggccgaagctgaagccgcagagcacagagaagagtaataccgccaaccgcccgtcagggcggttggcatatgggagcgatcatgtttgatatcggcgttaatctgaccagttcgcagttttcccgcgatcatgatgaggtagtggcgcgcgccctggcggcgggggttaacggcatgctgctgaccggcacaaatttggcggagagccagcaggcgcagaaactggcgagccgctattccggctgctggtccacggcgggggttcatccccatgacggtagcagctggacgccagcggtcgccgaggcgatttataccctcgccggcgagccgcaggtggtggcgataggcgagtgcggtctggattttaaccggaatttttccacgccgcacgagcaggaggtagcgttcagcgcccagttggcgctggccgctgagctgtcgatgccggtgtttttgcactgccgcgacgcccacgatcggtttctgacgctgcttaaaccctggcttgagaagatcccgggcgcggtgctgcactgctttaccggcagccgcagcgaggtgcaggaatgcctggatctgggcctgtttatcggtattaccggttgggtatgcgatgagcggcggggactggagctgcgcgagctgctgccggcgatcccggcggaacgtctgctgctggagaccgatgcgccttatctgctgccgcgcgacctcaagccgaaaccggcctcgcggcgtaacgagcccgcgtatttgccgcatatcctggccagcgtcgcggcctggcgcggcgaggaggcgcaatggctggaggcgcaaacggacgcaaacgtcagggcgctgtttggcgttgacattaacggcgtttagattttctggaagtcggtatttttaacgctctgcaggacttgcttattcagcaggtttaacagcaacatagagcgcgcttcgccgtcgggctcggtgaagatcgcctccaggccttcaaacgcgccgtcggtgattagcacgctatcgccctcatgcggcgtttccgggtcggtaatcccttccggtttgtagatagaaagctgatggatgaccgccgaggggacgatagcgggtagggcgccaaagcgcacgaagttgttaaccccgcgagtggcgctgatggtggtggtatgaatcacctctggatcgaactcaataaacaggtagttcgggaacaacggttcgctgaccatggtgcgtttaccgcgaatgattttttccagcgcaatcgtcggcatcaggcagttaactgactgacgttccagatgttcctgggctcgttgtagctgcccacgtttgcaatacagtaagtaccaggcttgcataatgactcattccacttctaataacggcaagcataacaaatggctggtgtaatcgcgaaagccattataattgaaatccaaatttcagcgttctttcacgctaatttaacaaaattacagcatcgcgccgtcgaacaccgtataattagccgcctgtagagaggtcaataacacttccatgaaatatcacgatcttcgcgactttctgacactcctggaacaacagggcgaactaaaacgtatcactctgccggtcgatcctcacctggaaatcaccgaaattgccgaccggactctgcgcgccggcggcccggcgctgctgtttgagaatccgaaaggctataccatgccggtgctgtgcaatctgttcggcacgccgcgtcgcgtggcgttggggatggggcaggaggatgtcagttcgctgcgcgaggtgggtaaactgttggcctttctgaaagaacctgagccgccaaaaggcttccgcgacctgtttgataagctgccgcagttcaagcaagtgctgaatatgccgaccaaacgcctgcgtggcgccccctgtcagcaaaaaatcatccagggcgatgatgtcgatctgaataaaatcccgattatgacctgctggccggaagatgccgcgccgctgatcacctgggggttgacggtaacccgcgggccgcacaaagagcggcagaacctgggaatttatcgccagcagctgatcggcaaaaacaaactgattatgcgctggctgtctcatcgcggcggcgcgctggatttccaggagtggtgcgcggcgcgtccgggcgaacgcttcccggtttccgtggcgcttggcgccgatccggcaaccattcttggcgcggtgacgccggtgcccgatcccctgtcggaatatgcctttgcaggcctgctgcgcggcaccaagaccgaagtggttaagtgcgtctccaatgaccttgaagtgccggccagcgcggaaattgtgctagaaggctacattgaggccggtgaaatggcgccggaaggcccgtatggcgaccacaccggttactacaatgaagtagaccagttcccggtgtttacggtaacccatattacccagcgtgaagacgcgatttatcattctacctataccggccgaccgcccgatgagccagcggtgctgggcgtggcgctgaatgaagtcttcgtcccgatcctgcaaaagcagttcccggaaatcgttgatttctatctgccgccggaagggtgctcctatcgcctggcggtggtgaccatgaaaaaacagtacgcgggacatgccaagcgcgtaatgatgggcgtctggtcgttcctgcgccagtttatgtacaccaagttcgtgattgtctgcgatgacgacgtcaatgcacgcgactggaacgatgtgatttgggcgatcactacccgtatggacccggctcgtgatacggtactggtagagaatacgccaattgattatctggattttgcctcgccggtttccggcctgggttcaaaaatggggctggatgccaccaataaatggcctggcgaaacccagcgtgaatggggtcgcccaatcaaaaaagatcctgccgttacggcgcgtattgacgccatctgggatgaactggccatctttaaacaacagtaagcggggctaacgccgctgttttgctctattgacccgacagaggggacgcatgacaaccttaagctgtaaagtgacctcggtggaggcgattaccgataccgtatatcgtgttcgattagtgccggaagcggcattttccttccgtgccggccagtatctgatggtggtaatggatgagcgcgacaagcgcccgttctccatggcttccacgccggcggaacaggaatttatcgagctgcatatcggcgcctcggagctcaatctgtacgcgatggcggtcatggatcgcattctgaaagagcgtgaaattgaggttgatattccgcatggcgaagcgtggctgcgcgatgacgaagatcgcccgctgattctgatcgccggcggtaccggattctcttatgtgcgttctattctgttaagcgcgctggcgcgtaacccggatcgcgatatcgccatttattggggcggtcgcgaggctaagcatctgtacgatctggccgagctggaagcgttaagcatcaagcatccgaatctgcgcatcgagccggtggttgaacagccggaagaagggtggcgtggtcgctcaggtacggtactcaccgccgtgctgcaggattacggtacgctggccgagcatgacatctacattgctggtcgttttgagatggccaagatcgctcgcgacctgttctgtaatgagcgcggcgcgcgtgaagatcgcctgtttggcgatgcgtttgcgtttatctgaaaataaaaaaacccgcccctgacaggcgggaagaacggcaactaaacctgctctcttcgccatagccgccaggttctggtggcaatggcgttgagataccctttcgcttaaacccgctcaaacacggtagcgatcccttgtcccaggccgatacacatggtggcgaggccgaactgagcgtctttgcgctccatctggttgatcagcgtggtgctaatacgcgccccggaacagcccagcggatgaccgagcgcgatcgccccgccgttgaggttgatcttctcatcgatctgctccattaagcccagatctttaatacacggtaggatctgcgcggcaaatgcttcattcatttcaaaaacgtcgatattgctggtggataagcccgcttttttcagcgccagctttgaggccggaaccgggccataacccataatggacgggtcgcagccgaccaccgccattgaacggacgcgagcgcgcggcttcagccccagctcgcgagcgcggctttcgctcatcagcagcatcgccgctgcgccatcggaaagggcggaagaggtacccgccgttaccgtaccggtcaccgggtcaaacgccggtttaagcgtggacagcgtctcgacggtggtttccgggcggatcacctcgtcatagttaaaggacttgagtacgccatcggcatcgtggccgccggtggggataatctccgctttgaatgcgccggactgggttgcggcccaggcacgagcgtgagagcgcgcggcgaactgatcctgcatctcgcggctaataccgtgcagacgcgccagcatctccgcagtcagccccatcatccctgccgcctttgccacgttgcggctgaggcccggatggaaatcgacgccatggctcattggcacatggcccatgtgctcgacgccgccaatcaggcagacgctggcatcgccggtcatgatcatacgggccgcatcgtgcagcgcctgcatggaagaaccgcacagacggttgaccgtatttgctggtaccgaatgcgggatctccgccagcagcgccgcgtttcgggcgatgttaaaaccctgctcgagggtttgctgcacgcaaccccagtagatatcgtctatcgcgcttgcctcaagcgacggattgcgcgacagcaggctacgcatcaggtgcgcggagaggtcttccgcgcgcacgtggcgaaatgcgccgcccttcgaacggcccatcggggtgcgaattgcatcgacaatgacaacctgttccattgtgactccttaagccgttttcagagcgccaaccggacgggctggctctacctggggataatacgcttcgttatggcgcgctttgtcacgcagaccggctggcacttcatacagcgggccaaggtgctggtattgctgcgctatatcgagatacttcgcgctgccgatggtgtccagccagcggaatgcgccgccgtggaacggagggaagcccaggccgtataccagcgccatatccgcttccgccgggctggcgataatgccttcttccaggcagcggacgacttcgttaaccatcgggatcatcatgcgggcgataatctcttcatcgctgaaatcgcgcttcgactggctgacgtcggccagcaggctgtcgacggcagcatcttcttctttcttcggcttacctttgctgtcgtctttatagcgccagaagccgaggccgttcttctggccgaaacggttggcgtcaaacagggcgtcgatggcgtcgcgataatctttctgcatccgctgcgggaagcccgccgccatgaccgcctgagcatggtgcgcggtatcgatgccgaccacgtccagtagataagccgggcccatcggccagccaaactgtttctccatcactttgtcgactttgcggaagtccgctccgtcgcgcagcagctggctgaagccggcgaagtaggggaacagtacccggttgacgaagaagccgggacaatcattcaccacgatcggcgttttgcccattttgctggcccaggccaccactttggcaatggtattatccgaggttttttcgccgcggatcacttcaaccagcggcatgcgatgcaccgggttaaagaagtgcataccgcagaagttttccgggcgctgcagaacgctggccagctcgctgatggggatcgttgaggtgttggacgccagcacggtatccgggcgcacttttgactcggtttccgctagtacggctttcttcactttcgggttttcgaccaccgcttcaacaaccacgtcgacgcgatcaaaaccgctgtattccagggttggctgaatggtgcttatcactccggccagcttcagaccgtcgattttgccgcgttccagctgtttattcagcagcttcgccgcttcggtcatgccaagggtcagcgatttgtcgctgatgtctttcatcaccaccggcacgcccttccaggccgactggtaagcgataccgccgcccataatgccagcgcccaggacggcagcatgcttcggcgtctcgacatctttggtcagctttttcgctttcgctttgacgtactggtcgttcaggaagataccaaccagcgcgcgggcctcattggtatgggccagcgggacaaagcttttattttccagcaccagggcttcttcacgaccaagacgcgcggcggcttcaatggttttgaccgcggtgatcggcgccgggtaatgcttcccggcggtttgcgcgaccatgcctttggcaatcgtgaagctcatggcggcttcaattttgctgagcttcagcggctccagcttcggctgacgtttcgctttccagtccaggtcgccattcatggcctgacgtaggatcgccagcgcgccgtcgcgtagtttttccgcagcgaccacgccatccaccaggccgattttcagtgcttgatcggcgccgacgtctttcccggcggcaataatttccagcgcgctatcggcgccgagcaggcgcggcagacgcacggaaccgccgaagcccggcataatgccgagcttggtttccggcagcccaatgcgcaggtccggcgtcgccaggcggtaatcggtcgccagcacgcattcgcaaccgccgcccagcgcatagccattgacggcagagatagtggggacggggagatcttccagacgattgaagacgctgttagcaaaatgcagccactggcttaactgctcctcagggaccaggaacagcgagaggaattcggtgatatccgcgccgacgataaatgccgctttttcagagcgcagcagcagacctttgagatcgctttgtttttccagtacgtccagcgcatgaccgaggctggctacggttgcggtatcaagcttgttgaccgaacctggggcatcgaacaccagttcggcgatgccatcttccagccagtcgaggtacagggtgtcgcctttgtagagcatgtcagtctcctgaatccagcaatatgatctggtcataccagatgagacggagtgtggaatttatgttaaagaattgcaaattactctttaaataattgctggtcggatcacatccggcggaaatcacccgcacgcaggtcgatgtgctaagatgcggtgtatcacgatcccataaaagtaaaggataaaagatggaatccctggccgcgctctataaaaatcatattgttaccctacaagaacgtacccgcgacgtcctggcccgttttcaaatggatgctctgctgattcactccggcgagctggttaacgtcttccttgatgaccatccgtacccgttcaaggtcaatccgcagttcaaagcctgggtgcctgtgactcaggtgcctaactgctggctgctggtggacggtgtgaataaaccgaagctgtggttctatctgccggtagattactggcataacgttgagccgttgccgacctctttctggaccgaagagatagacgtgatcgcgctaccgaaggccgatggcatcggcagccagctgcctgccgctcgcggtaatattggctatatcggcccggtgcctgagcgcgcgctgggcctgggtatcgccgcggataagatcaacccgaaaggggttatcgactacctgcattactaccgggcttacaaaaccgattacgagctggcctgcatgcgtgaagcgcagaagtcggcggtgaatggtcatcgtgcggcctacgaagctttccagtcggggatgagcgaattcgatatcaaccaggcctatctcaccgccaccggccatcgtgataccgacgtgccttacagcaatattgtcgcgctgaatgagcatgcctccgtcctgcactacaccaaactggaccatcgtgccccggcggagatgcgcagtttcctgctcgacgccggtgcggaatataacggctatgccgcagatctgacgcgcacctgggcggcgcacggcgataacgactttgcccatctgatcaaagacgttaacgatgagcagcaggcgctgattagtaccatgaaggccggtaccagttacattgattaccatatccagttccatcagcgtatcgcgaagctgttgcgtaaacaccagttggttaccgacatgagcgaagaggcgatggtggagaatgacctgaccgggccgtttatgccgcacgggattggccatccgctgggtctgcaggtgcatgatgtcgctggctttatgcaggatgacaccggtacgcatctggcggcgccgtcgaaatacccgtatctgcgctgcacccgtattatcgagccgcggatggtgttaactattgaacccggcatctacttcatcgagtcgttactggcgccgtggcgtgaaggcccgttcagcaagcactttaactggcaaaaaattgacgccatgaagccgttcggtgggatccgtatcgaagataacgtggtgattcacgaaaacagtatcgaaaatatgacgcgcgatctgaagctggcctgatggagagctggttaatcccggcggcgccggttaccgtcgttgaggagattaaaaaaagccgttttatcacgctgttggcgcataccgacggcgtggcggcggcaaaagcttttgtcgagtccgtcagagcggatcaccctgatgcccgccaccactgcgtggcgtgggtcgcggggccgcctgatgattcgcaacagctggggttttcagacgatggcgaaccggcgggaacggcgggtaaaccgatgctggcacagctgatgggaagcggcgtcggcgagataaccgctgtcgtcgtgcgttactacggtggtatcctgctgggcaccggtggtctggttaaggcctatggcggcggggtgcatcaggcgctggcgcagctgacgacgctgcgcaagacgccgttaacggcatatactttgcagtgtgagtatgggcaactggccggcgtcgaagcgctgctcgcccaattctccggaaacgtcgttgaaagcgaatatctggcgtcagttcggctgcgcgtggcgcttccccaggccgaagtggcggctttttcagcaagactggctgattttagtcgtggttcattgcaattactgaagattaacgaataatcccctctgttttttgcctatcaaaggaagcgccagagatgcattttcgcgccataacccgaatcgttggactgctggtcatcttgttttcggggacgatgatcgtcccgggattagtggccctgatatatcgcgatggcgcgggacgggccttcactcaaaccttctttgtcgctctggcgatcggctccatgctgtggtggccgaaccgtaagcaaaaaggcgaactgaaatctcgtgaagggtttctgatcgtggtgctgttctggaccgtgctggggagcgtgggggccttgccctttatcttctccgaacagccgaacctgacggtgacggatgccttcttcgagtcattttccggcctgacgacgaccggggcgaccactctggtggggctggactcgcttccgcacgctatcctcttttatcgccagatgctgcagtggttcggcggcatggggatcattgtgctggcggtagcgattctgcctatcctcggcgtcggggggatgcagctctaccgcgcggaaatgcccggcccgctgaaggataacaagatgcgtccgcgtattgccgagacggcgaagacattgtggctcatctatgtgttactcacgatcgcctgcgcattggcgctctggtttgccggtatgccggcgttcgatgcgatcgggcacagtttcgccaccatcgccatcggcggtttctcgactcacgatgccagcgtcggctatttcaacagcccgatgatcaactccatcattgccatcttcctgctgatctccggctgtaactacggtctgcatttttcgttgttgagcggacgcagcctgaaggtgtactggcgcgaccccgaatttaggatgttcattggcgtccagttgacgctggtcatcgtctgtacgctggtgctatggcttcataacgtgtacggctcggtgttgacgacgctgaaccaggcgtttttccaggtggtgtcgatggcgaccaccgcggggttcaccaccgatagcattgcacgctggccgctgttccttccggtgctgttgctgtgctccgcatttatcggcggctgcgctggctccacgggcggtggattaaaagtgatccgtatcctgttgctgttcaagcagggcaaccgtgagctgaagcgtttggtgcacccgaatgcggtgtatagcattaaattaggtaaccgcgcgctgccggaacgtattctggaagcggtatggggattcttctccgcctatgcgctggtctttatcattagtatgctggcgattatcgccaccggggtggatgacttctctgctttcgcctccgtggtggcgacattgaacaacctcgggcctgggctcggcgtcgtcgcggataactttgccaccatgaacccggtcgcgaaatggatcctgattgctaatatgctgtttggtcgtctggaagtgttcaccttactggtgctctttacccccactttctggcgcgaataacaggagtgctcgtgaaaactttaattctcttctccacccgcgacgggcagacccgtgaaatcgcttcgtttctcgcctctgagcttaaagagctgggcatcgatgcggacaccctgaacctgaaccgtaccgatgtcgtcgaatggcatcactacgatcgggtggtcattggcgcgtcgattcgctatgggcactttcatccggcggtggaccgctttgtgaaaaagcatctggcagcattgcaggcgctgccgggggcattcttttcggttaacctggtggcgcgtaaacccgagaagcgcacgccgcagaccaacagctatacgcgtaagtttctgctgaactcgccgtggcagccgcagagctgcgcggtatttgccggcgcgctgcgctacccgcgctacagctggtacgatcggtttatgatccgcctgattatgaaaatgaccgggggtgaaacggatacccgcaaagaagtggtctataccgactggcaacaggtatcccggtttgctcgggaaatcgcacaaatggcgcgcaaatagcgcgtaaaactcgcgttgtgatggaaaatcgagcgaacgaaaagtttttttgcatttccccttgtcacctcagaattactccctataatgcgcctccactgacacggaacaacggcaagcaagccgccgggtcagcggggttccggtgagaacctcgcagagaaaagcaaaaataaatgcttgactctgcagcgggaaagcgtaatatgcacaccccgagccgcagcgaaaacgaagcggcactgctctttaacaatttatcagacaatctgtgtgggcactcaaagtgacatggattcttaacgtcctcggacgaaaaatgaataccaagtctcaagagtgaacacgtaattcattacgaagtttaattctttgagcatcaaacttaaattgaagagtttgatcatggctcagattgaacgctggcggcaggcctaacacatgcaagtcgagcggtagcacagagagcttgctctcgggtgacgagcggcggacgggtgagtaatgtctgggaaactgcctgatggagggggataactactggaaacggtagctaataccgcataacgtcgcaagaccaaagtgggggaccttcgggcctcatgccatcagatgtgcccagatgggattagctagtaggtggggtaacggctcacctaggcgacgatccctagctggtctgagaggatgaccagccacactggaactgagacacggtccagactcctacgggaggcagcagtggggaatattgcacaatgggcgcaagcctgatgcagccatgccgcgtgtgtgaagaaggccttcgggttgtaaagcactttcagcggggaggaaggcgataaggttaataaccttgtcgattgacgttacccgcagaagaagcaccggctaactccgtgccagcagccgcggtaatacggagggtgcaagcgttaatcggaattactgggcgtaaagcgcacgcaggcggtctgtcaagtcggatgtgaaatccccgggctcaacctgggaactgcattcgaaactggcaggctagagtcttgtagaggggggtagaattccaggtgtagcggtgaaatgcgtagagatctggaggaataccggtggcgaaggcggccccctggacaaagactgacgctcaggtgcgaaagcgtggggagcaaacaggattagataccctggtagtccacgccgtaaacgatgtcgatttggaggttgtgcccttgaggcgtggcttccggagctaacgcgttaaatcgaccgcctggggagtacggccgcaaggttaaaactcaaatgaattgacgggggcccgcacaagcggtggagcatgtggtttaattcgatgcaacgcgaagaaccttacctggtcttgacatccacagaactttccagagatggattggtgccttcgggaactgtgagacaggtgctgcatggctgtcgtcagctcgtgttgtgaaatgttgggttaagtcccgcaacgagcgcaacccttatcctttgttgccagcggtccggccgggaactcaaaggagactgccagtgataaactggaggaaggtggggatgacgtcaagtcatcatggcccttacgaccagggctacacacgtgctacaatggcatatacaaagagaagcgacctcgcgagagcaagcggacctcataaagtatgtcgtagtccggattggagtctgcaactcgactccatgaagtcggaatcgctagtaatcgtagatcagaatgctacggtgaatacgttcccgggccttgtacacaccgcccgtcacaccatgggagtgggttgcaaaagaagtaggtagcttaaccttcgggagggcgcttaccactttgtgattcatgactggggtgaagtcgtaacaaggtaaccgtaggggaacctgcggttggatcacctccttaccttaaagaacctgcctttgcagtgctcacacagattgtctgatgaaaaacagcagtaaaaacctctacaggcttgtagctcaggtggttagagcgcacccctgataagggtgaggtcggtggttcaagtccactcaggcctaccaaatttgcgaagcaaatttgaagaggttgcaaacgatggggctatagctcagctgggagagcgcctgctttgcacgcaggaggtctgcggttcgatcccgcatagctccaccatctttactgcgaacacaagaaaacttcagagtgaacctgaaaaggtgcactgcgaagttttgctctttaaaaatctggatcaagctgaaaattgaaacgacacacagttaatgtgtgttcgagtctctcaaattttcgcaatcagaagtgaaacatcttcgggttgtgaggttaagcgactaagcgtacacggtggatgccctggcagtcagaggcgatgaaggacgtgctaatctgcgaaaagcgtcggtaaggtgatatgaaccgttataaccggcgatgtccgaatggggaaacccagtgtgattcgtcacactatcgttaactgaatacataggttaacgaggcgaaccgggggaactgaaacatctaagtaccccgaggaaaagaaatcaaccgagattcccccagtagcggcgagcgaacggggagcagcccagagtctgaatcagcttgtgtgttagtggaacggtctggaaagtccgacggtacagggtgatagtcccgtacaccaaaatgcacaggctgtgaactcgaagagtagggcgggacacgtggtatcctgtctgaatatggggggaccatcctccaaggctaaatactcctgactgaccgatagtgaaccagtaccgtgagggaaaggcgaaaagaaccccggcgaggggagtgaaaaagaacctgaaaccgtgtacgtacaagcagtgggagcaccttcgggtgtgactgcgtaccttttgtataatgggtcagcgacttatattctgtagcaaggttaaccgtataggggagccgcagggaaaccgagtcttaactgggcgttaagttgcagggtatagacccgaaacccggtgatctagccatgggcaggttgaaggttgggtaacactaactggaggaccgaaccgactaatgttgaaaaattagcggatgacttgtggctgggggtgaaaggccaatcaaaccgggagatagctggttctccccgaaagctatttaggtagcgcctcgtgaactcatcttcgggggtagagcactgtttcggctagggggtcatcccgacttaccaacccgatgcaaactacgaataccgaagaatgttatcacgggagacacacggcgggtgctaacgtccgtcgtgaagagggaaacaacccagaccgccagctaaggtcccaaagtcatggttaagtgggaaacgatgtgggaaggcacagacagccaggatgttggcttagaagcagccatcatttaaagaaagcgtaatagctcactggtcgagtcggcctgcgcggaagatgtaacggggctaaaccatgcaccgaagctgcggcagcgacactatgtgttgttgggtaggggagcgttctgtaagcctgcgaaggtgtgctgtgaggcatgctggaggtatcagaagtgcgaatgctgacataagtaacgataaagcgggtgaaaagcccgctcgccggaagaccaagggttcctgtccaacgttaatcggggcagggtgagtcgacccctaaggcgaggccgaaaggcgtagtcgatgggaaacaggttaatattcctgtacttggtgttactgcgaaggggggacggagaaggctatgttagccgggcgacggttgtcccggtttaagcatgtaggctggttatccaggcaaatccggataaccaaggctgaggtgtgatgacgaggcactacggtgctgaagtaacaaatgccctgcttccaggaaaagcctctaagcatcaggtaacatcaaatcgtaccccaaaccgacacaggtggtcaggtagagaataccaaggcgcttgagagaactcgggtgaaggaactaggcaaaatggtgccgtaacttcgggagaaggcacgctggtgtgtaggtgaagtccctgcggatggagctgagaccagtcgaagataccagctggctgcaactgtttattaaaaacacagcactgtgcaaacacgaaagtggacgtatacggtgtgacgcctgcccggtgccggaaggttaattgatggggttatccgtaaggagaagctcttgatcgaagccccggtaaacggcggccgtaactataacggtcctaaggtagcgaaattccttgtcgggtaagttccgacctgcacgaatggcgtaatgatggccaggctgtctccacccgagactcagtgaaattgaactcgctgtgaagatgcagtgtacccgcggcaagacggaaagaccccgtgaacctttactatagcttgacactgaacattgagccttgatgtgtaggataggtgggaggctttgaagcgtggacgccagtctgcgtggagccaaccttgaaataccaccctttaatgtttgatgttctaacgttggcccctgaccggggttgcggacagtgtctggtgggtagtttgactggggcggtctcctcccaaagcgtaacggaggagcacgaaggttagctaatcctggtcggacatcaggaggttagtgcaatggcataagctagcttgactgcgagcgtgacggcgcgagcaggtgcgaaagcaggtcatagtgatccggtggttctgaatggaagggccatcgctcaacggataaaaggtactccggggataacaggctgataccgcccaagagttcatatcgacggcggtgtttggcacctcgatgtcggctcatcacatcctggggctgaagtaggtcccaagggtatggctgttcgccatttaaagtggtacgcgagctgggtttagaacgtcgtgagacagttcggtccctatctgccgtgggcgctggagaattgaggggggctgctcctagtacgagaggaccggagtggacgcatcactggtgttcgggttgtcatgccaatggcactgcccggtagctaaatgcggaagagataagtgctgaaagcatctaagcacgaaacttgccccgagatgagttctccctgagactttaagtctcctgaaggaacgttgaagacgacgacgttgataggccgggtgtgtaagcgcagcgatgcgttgagctaaccggtactaatgaaccgtgaggcttaaccttacaacgccgaagatgttttggcgatttgagagaattttcagctctgatacagattaatcgatacgtcggtgagacgtattgataaaacagaatttgcctggcggcactagcgcggtggtcccacctgaccccatgccgaactcagaagtgaaacgccgtagcgccgatggtagtgtggggtctccccatgtgagagtagggaactgccaggcatcaaataaagcagaaagcccggtcgaaagaccgggctttttgttttatctgttgtttgtcggtgagcgctctccagagtaggacaaatcagccgggagcggatttgaacgttgcgcagcaacggcccggagggtggcgggcaggacgcccgccataaactgccaggcatcaaacaagtgaagagcccatcctgtcggatgggctttttgcgtttctgtcgtccggccagcgtgccggtatgtctccccggtggcgctgcgcctaccggggctacgggcctgtcgcgttctgtcgcccgcaccggtacaccacatcactaccggtaacgccacgcaatatcattgcccctgtaatcagacaagccttcccccgccagatacgataaactaacgccgattttgcatcaggaagccactatgaaccactccctcaaaccctggaatacctttggcattgaacgcttcgccaagacgatagtacgcgccgaaactgagcaacagttgctaagcgcctggcaaaccgctgccgcggcaggcgaacccacgctgatccttggggaaggcagtaatgtcctgtttctgaacgactatgccggtacggtgatcctcaaccggattatggggatcgaggtgagcgaaacgccggaagcctggcgcttgcacgtcggcgccggcgaaaactggcatcaactggtgcagttcacgctacagcatgcgatgccaggtctggaaaatctggcgttaatccctggctgcgcaggatcttcgccgatccagaatattggcgcctacggcgttgagctacagcgggtttgcgaatatgttgactgcattgagctggaaaccgggcgtaagcaacgtctttcagccgcggaatgccgttttggctatcgcgacagtatcttcaaacatgaatatcaggaccgctatgccatcgttgcgattggcttatcgttagcgaaaacatggcagcctgtactgagttacggtgatttaacgcgtctcgatccgcagaccgtcacgccgcagcaggtatttgatgcggtctgtcatatgcgaatgactaaattgccggatccaaagattaacggtaatgccggcagcttttttaagaacccgatcgtcagcgctcaggttgcggaagcgctgctggcgcagttccctcatgcaccgcactatccgcaggcaaatggcagcgtcaagctggccgctggctggctaatcgatcaatgtgagctcaaaggacaacgcatcggcggcgctgccgtccatcggcagcaggcgctggtactgattaatgaagatcgagcgaccagcgaggatgtggtgaaacttgctcattatgttcgccagcgggtgggtgcgaaattcgatgtatggcttcagcccgaggtgcgcttcattggcacgcatggtgaagtcaacgcagaggagagcattgcgtgaaagaccatactatccctttaacgctaatttctatccttgctgatggtgagtttcactctggcgaacagcttggtgagcagttaggcatgagccgggcggcgattaataagcacatccagaccttacgtgactggggcgtcgatgtgtttactgtgccgggcaagggttacagcctgccggagcctattcatctattagatgagaaaaagatttctcaagagatagaccatggccgagtgacagtccttcccgtcatcgactctactaaccagtatttgttggacaggcttgatgagctgacgtccggagatgcctgtgtggctgaatatcagcaagcagggcgaggccggcgaggcagaaaatggttttcgccctttggcgcgaatctctatctctccatgtactggcgtctggagcagggcccggcagcggctattggcctaagcctggtgatcggtattgtgatcgctgaagttctgcagcagctcggggccgaacaggttcgcgtgaaatggccaaacgatatttacctgcaggatcgtaagctgtcagggatcctcgtagaactgacggggaaaacgggcgatgccgcacaaatcgtcagcggcgcgggtatcaaccttgtgatgcgtcgcgtggagtctgatgtcgtcaatcaggggtggatcagccttcaggaagcgggggtggtcatcgaccgtaacctcctcgccgcgcgcctgattaaagagctgcgcctgggactggagctgttcgagcaggaaggattggctccctatctaccgcgctgggaaaaactggataactttattcatcgcccggtgaaactgattatcggtgataaagaaatttacggcatttcgcgtggcattgacgcccagggcgcactattgctggagcaggatggtgtaataaaagcttgggtgggtggtgaaatatcattgcgcagtgcagaataaaaaagggagcttcggctcccttattttatttacgtaagcgtacctgattcactgagtgattggcgctcttagtcatgatcaggctggcgcgctcgcgagttggaaggatattttctttaagattcattaggttgatttcattccatagcgaagtggcaatatctaccgcttcttccttcgagagcttagcgtaattatggaaataggaatccggatcggtaaacgccccttcccggaatttaagaaagcggttgatataccagcttttcaataattcttccggggcatcgacataaatagaaaagtcgacaaaatcggaaacgaatacatgatggggatcgtgcggataatccattccactttgcagaacattcagcccttcaagaattaaaatatccggttgcgcgacggttttgtcaccattgggaataacatcataaatcagatgggaataaactggcgcggttgcctgcggtacccctgatttgagatcggagacaaacttcaccaggcgatgcatatcataggactgcggaaagccttttttcttcattaacccacgttcttttaaaaccgagttagggtgcaaaaaaccgtcggtggtaatgagttcgacatggcgatgctccggccaacgactaagcaaagcttgcagaacgcgggcggtggtgctttttcctaccgcaacgctgccagcgatactgataatatagggaattcgctgaccattggtgccaagaaattgttcgagaacagcctggcgacgcaggttagaactgatatagaagttgagcaaacgcgacagcggcaaatagatctcggcaacctcttccagagagagatcttcgttgatgccttttaaccgcgtgatttcttcctcggttaacgtcatcgggacagaatcacgaagtgcagcccattggtggcggttaaattgtaggtacggtgtcattaacgtctgctctttttggctcataagcatgttcttactatcaccgaataccttgaaacggtgatgcttcacacgagttaatcaggacaatgggcaggagggtaacaccagattgccgggaataataagaaaaaaactcattgaatgctgctttctcgcgccagcatcacaagagaagaataagtttcttattctttgcaaagcatggcctttgctaacaggctaggctagcggcctgaatcctttccgtcagcggtcagcatgcgatagaggtaaccggagatgatcggacagcgcctgaagcgccgaattattggcgaatatttgcactccgctgcttgaaattacaccgttttttcgcgtgagagcacaaaatgtgagcaagagaacgttttatgcaaatttttagttgcatgaactcgctcctctccctagaatgcgcgctacttgatgccgacttagctcagtaggtagagcaactgacttgtaatcagtaggtcaccagttcgattccggtagtcggcaccataacaatttgggtggggttcccgagcggccaaagggagcagactgtaaatctgccgtcatcgacttcgaaggttcgaatccttcccccaccaccactttctggcgacgctttgcggagccggagttggttgggtaaactaatcagctcaatactaaagagagcagtctctttagtattacagaaagaactgggtagccgagtttcaggatgcgggcatcgtataatggctattacctcagccttccaagctgatgatgcgggttcgattcccgctgcccgctccagacgtgctgatatggctcagttggtagagcgcacccttggtaagggtgaggtccccagttcgactctgggtatcagcaccacttcttttctctccttccctgtttctcttctgttatgttcattcaacaagtcgggcatgttgcctggttgatgtggtgatatcaccgatttatccgtgtcttagagggacaatcgatgtctaaagaaaagtttgaacgtacaaaaccgcacgttaacgtcggtactatcggccacgttgaccatggtaaaacaacgctgaccgctgccatcactaccgtactggctaaaacctacggtggttccgctcgcgcattcgaccagatcgataacgcgccggaagaaaaagctcgtggtatcaccatcaacacctctcacgttgaatatgacaccccgactcgccactacgcgcacgtagactgcccgggccacgccgactatgttaaaaacatgatcaccggtgctgcgcagatggacggcgcgatcctggttgttgctgcgactgacggcccgatgccgcagactcgtgagcacatcctgctgggtcgtcaggtaggcgttccgtacatcatcgtgttcctgaacaaatgcgacatggttgatgacgaagagctgctggaactggttgagatggaagttcgtgaactgctgtctcagtacgatttcccgggcgacgacaccccgatcgttcgtggttctgctctgaaagcgctggaaggcgacgcagagtgggaagcgaaaatcatcgaactggctggccacctggatacctatatcccggaaccagagcgtgcgattgacaagccgttcctgctgccgatcgaagacgtattctccatctctggtcgtggtaccgttgttaccggtcgtgtagagcgcggtatcatcaaagtaggtgaagaagttgaaatcgttggtatcaaagaaaccgcgaaaaccacctgtactggcgttgaaatgttccgcaaactgctggacgaaggccgtgctggtgagaacgtaggtgttctgctgcgtggtatcaaacgtgaagaaatcgaacgtggtcaggtactggctaagccgggcaccatcaacccgcacaccaagttcgaatctgaagtgtacatcctgtccaaagacgaaggcggccgtcatactccgttcttcaaaggctaccgtccgcagttctacttccgtactactgacgtgactggcaccatcgaactgccggaaggcgtagagatggtaatgccgggcgacaacatcaaaatggttgttaccctgatccacccgatcgcgatggacgacggtctgcgtttcgcaatccgtgaaggcggtcgtaccgttggcgcgggcgtggttgctaaagttctcggctaatcgctgataacatttgacgcaatgcgcaataaaagggcatcatttgatgccctttttgcacgctttcacaccagaacctggctcatcagtgattttatttgtcataatcattgctgagacaggctctgaagagggcgtttatacaccaaaccattcgagcctcagggcgacggctaatcaactccttctttgcaacagcagggcaggggtgacaccaccgtcaacattgaagcaatttgaatagttaagtgtataatccgaaacttaatttcggtttggatcgcctcgcccccgcggggtgaaattgtttgtagaatacttctgacaggttggtttatgagtgcgaataccgaagctcaagggagcgggcgcggcctggaagcgatgaagtggattatcgttgccgtgctgctgatcgtggcgatcgtgggcaacttcctttatcgtgacattatgctggcggtgcgtgcgctggccgtggttattcttattgctgctgccggtggcgtcgcgctgttgacgacgaaaggtaaggcgaccgttgcttttgctcgcgaagcgagaaccgaagttcgtaaagtgatttggccgactcgccaggaaacgctgcatactacgctgattgttgctgccgtgactgcagtaatgtcactgatcctgtggggactggatggtattctggttcgcctggtctcctttatcactggcctgaggttctgagatgtctgaagctcctaaaaagcgctggtacgtcgttcaggcgttttccggttttgaaggtcgcgtagccacgtcgctgcgtgaacatatcaaattacacaacatggaagagttatttggcgaagtcatggtcccgaccgaagaagtggttgagatccgtggcggccagcgtcgcaaaagcgaacgtaaattcttcccgggctatgtcctggttcagatggtcatgaacgacgcaagctggcacctggtgcgcagcgtaccgcgcgtgatgggcttcatcggcggcacctctgaccgtccggcgccgatcagcgacaaagaagtcgacgccatcatgaatcgtctgcagcaggttggcgataagccgcgtccgaaaacgctgtttgaaccgggtgaaatggttcgcgttaacgacggtccgttcgctgactttaacggcgtggtggaagaagtggactatgagaagtcccgcctgaaagtttccgtttctatcttcggtcgtgcgaccccggtagaactggacttcagccaggttgagaaggcgtaagccggcgatcaaaaaagcagcgatttaatcgttgcatagggcgcgaaattggcatacaatttcgcgccttttgtttttatgggcccggcccgtaaaacgatgtttaatcacggggagcttctctgaagcgttaatacccaatttgaggatttaagaatggctaagaaagtccaagcctacgtcaagctgcaggttgcagctggtatggcgaacccgagcccgccggtcggcccagcactgggtcagcagggcgtgaacatcatggaattctgcaaagcgttcaacgctaaaactgattccctggagaaaggtctgccgatcccggttgttatcaccgtttacgctgaccgttcctttacctttgttaccaagactccgccggctgctgttctgctgaagaaagctgcaggcatcaagtctggttccggtaagccgaacaaagataaagtgggtaaaatctcccgcgctcagctgcaggaaatcgcgcagaccaaagctgccgacatgactggtgccgacattgaagcgatgactcgctccatcgaaggtactgcacgttccatgggcctggtagtggaggactaagaaatggctaaactgaccaagcgcatgcgcgtgatccgtgagaaagttgatgcaactaaacagtacgacatcaacgaagccattgctctgctgaaagagctggccaccgctaaatttaccgaaagcgtagacgttgccgttaacctcggcatcgacgctcgtaaatctgaccagaacgtccgtggcgcaactgtactgccgcacggtactggccgttccgttcgcgtagccgtatttacccagggcgcaaacgctgaagctgctaaagctgcaggcgctgagctggtaggtatggaagatctggctgagcagatcaaaaaaggcgaaatgaactttgacgttgttattgcttccccggatgcaatgcgcgttgttggccagctgggccaggttctgggtccgcgtggcctgatgccgaacccgaaagtaggtaccgtaactccgaacgttgctgaagcggttaaaaacgcgaaagcaggtcaggttcgttaccgtaacgacaaaaacggcatcatccacaccaccatcggtaaagtggactttgacgctgacaaactgaaagaaaacctggaagctctgctggttgcgctgaaaaaagcaaaaccgactcaggcgaaaggcgtgtacatcaagaaagttagcatctccaccactatgggtgcaggtgttgcagtagatcaggctggcctgaacgcttctgcaaactaatgcctttacgtgggcggtgattttgtctacaatcttacccccacgattctgtcaataagacagacgctatgcgagtcatttgaattgcagcaaggcagcaatcgagtgaatcaccgggagtgtagttaactacatgaccggtgtgaacgagagcagctaacgccgctgcggttcgaaggacgaagtcataggaagaatttgttcgttggagcctggcctatccaggcctccgtcgaagaccgcaggtgtttcgcaagaaacttaatcccctgcgtagacggtgacagaacgctaagattatttttggatattctggcttgtttctgctcaccgtatttagacgctcttttcgttgaattgagtgaagtgagttccagagcataggctctggcaaacatccaggagcaaagctaatggctttaaatcttcaagacaaacaagcgattgttgctgaagtcagcgaagtagccaaaggcgcgctgtctgcagtagttgcggattcccgtggcgtaactgtagataaaatgactgaactgcgtaaagcaggtcgtgaagctggcgtatacatgcgtgttgttcgtaacaccctgctgcgccgcgtcgttgaaggtactcagttcgagtgcctgaaagacacgtttgttggtccgaccctgattgcatactctatggaacacccgggcgctgctgctcgtctgttcaaagagttcgcgaaagcgaatgcaaaatttgaggtcaaagccgctgcctttgaaggtgagctgatcccggcgtcgcagatcgaccgcctggcaactctgccgacctacgaagaagcaattgcacgcctgatggcaaccatgaaagaagcttcggctggcaaactggttcgtactctggctgctgtacgcgatgcgaaagaagctgcttaatcgcagttatctttgtaaagcattcgcttacgtataaacttattctgatattcaggaacaatttaaatgtctatcactaaagatcaaatcattgaagcagtatccgctatgtccgtaatggacgttgttgagctgatctctgcaatggaagaaaaattcggtgtttccgctgctgctgctgtagctgtagctgctggcccggttgaagctgctgaagaaaaaactgaattcgacgtaattctgaaagctgctggcgctaacaaagttgctgttatcaaagcagtacgtggcgcaactggcctgggtctgaaagaagctaaagacctggtagaatctgctccggctgcactgaaagaaggcatcagcaaagacgacgctgaagctctgaaaaaatctctggaagaagctggcgctgaagttgaagttaaataagccaacccttccggttgcagcctgagaaatcaggctgaggctggtgactttttggtcaccagcctttttgcgctgtaaggcgccagtagcgtttcacgctgtttgactactggtttgcctctcaatgcttgtttctatcgacgacttaatatactgcgacaggttagggttcctgggctgtgtaaatcgcaatgaaatggtttaagcgtgatagcaacaggcattgcggaaagtgttccattttccggtcaacaaaatagtgttgcataaaaaactgccctctgcgggcagatgggtcgacttgtcagcgagctgaggaaccctatggtttactcctataccgagaaaaaacgtattcgtaaggattttggtaaacgtccacaagttctggatgtgccatatctcctttctatccagcttgactcgttccagaagtttatcgagcaagatcctgaagggcagtatggtctggaagctgctttccgttccgtattcccgattcagagctacagcggtaattccgagctgcaatacgtcagctaccgtctgggcgaaccggtttttgacgttaaagaatgtcagatccgtggcgtgacttattctgcaccgctgcgcgtaaaactgcgtctggtgatctacgagcgcgaagcgccagaaggcaccgtcaaagacattaaagaacaagaagtctacatgggcgaaattccgctcatgaccgacaacggtacctttgttatcaacggtaccgagcgtgttatcgtttctcagctgcaccgtagcccgggcgtcttctttgacagtgacaaaggtaagacccactcctccggtaaggttctgtataacgcacgtatcatcccttaccgcggttcctggctggacttcgaattcgacccgaaagacaacctgttcgttcgtatcgaccgtcgtcgtaagctgccggctaccatcatcctgcgcgcgctgaattacaccactgagcagatccttgacctgttcttcgaaaaagtggtctttgaaattcgcgacaacaagctgcagatggagctgattccggagcgtctgcgcggtgaaactgcctccttcgatatcgaagccaacggcaaagtgtacgttgagaaaggccgtcgcatcacggctcgtcatatccgtcagctggaaaaagacgatatcaagcatatcgaagtgccggttgaatatatcgcgggcaaagtggcggctaaagactatatcgatgaagcgactggcgaactgatctgcccggcgaacatggagctgagtctggatctgctggctaagctgagccagtctggccacaagcgtatcgaaacgctgttcaccaacgatctggaccacggcccgtacatctctgaaacggtacgcgtcgacccgactaacgatcgtctgagcgcgctggtagaaatctaccgcatgatgcgccctggcgagccgccgactcgtgaagccgctgaaagtctgtttgagaacctgttcttctctgaagaccgctacgatctgtccgcggttggtcgtatgaagttcaaccgttctctgctgcgcgacgaaatcgaaggttccggtatcctgagcaaagacgacatcatcgaagtgatgaagaagctcatcgatatccgtaacggtaaaggcgaagtggacgatatcgaccacctcggcaaccgtcgtatccgttccgttggcgaaatggcggaaaaccagttccgcgttggcctggtacgtgtagagcgtgcggtgaaagagcgtctgtctcttggcgatctggataccctgatgcctcaggatatgatcaacgccaagccgatttccgcagcagtgaaagagttctttggttccagccagctgtctcagtttatggaccagaacaacccgctgtctgagattacgcacaaacgtcgtatctccgcactcggcccaggcggtctgacccgtgagcgcgcaggcttcgaagttcgagacgtacacccgacccactacggtcgcgtatgtccgatcgaaacgcctgaaggtccgaacatcggtctgattaactccctgtccgtgtacgcgcagaccaacgaatatggcttccttgagacgccgtatcgtaaagtgaccaacggtgtggttactgacgaaattcactacctgtctgctatcgaagaaggcaactacgttatcgctcaggcgaactccaacctggatgaaaacggccacttcgtagaagatctggttacctgccgtagcaaaggcgaatccagcttgttcagccgcgaccaggttgactacatggacgtatccacccagcaggtggtatccgtcggtgcgtccctgatcccgttcctggaacacgatgacgccaaccgtgcattgatgggtgcgaacatgcaacgtcaggcggttccgactctgcgcgctgataagccgctggttggtaccggtatggaacgtgctgttgccgttgactccggtgttactgccgtggctaaacgtggcggtaccgttcagtacgtggatgcttcccgtatcgttatcaaagttaacgaagacgagatgtacccgggcgaagcaggtatcgacatctataacctgaccaagtacacccgttctaaccagaacacctgcatcaaccagatgccttgcgtgtccctgggcgaacctattgagcgcggcgacgtgctggcagacggcccgtccaccgacctcggtgagctggcgctgggtcagaacatgcgtgtagcgttcatgccgtggaacggttacaacttcgaagactccatcctcgtttccgagcgtgttgtccaggaagaccgtttcaccactatccacattcaggaactggcgtgcgtgtcccgtgacaccaagctggggccggaagagatcaccgctgatatcccgaacgtgggtgaagctgcgctctctaaactggatgagtccggtatcgtttatatcggtgcggaagtgaccggcggcgacattctggttggtaaggtaacgccgaaaggtgaaacccagctgacgccggaagagaaactgctgcgcgcgatcttcggtgagaaagcgtctgacgttaaagactcttctctgcgcgtaccgaacggtgtctctggtaccgttatcgacgttcaggtctttacccgtgacggcgtagaaaaagacaaacgtgctctggaaatcgaagagatgcagctgaagcaggccaaaaaagacctgtctgaagaactgcagatcctcgaagccggtctgttcagtcgtatctacgcggtgctggtctccggtggcgttgaagctgagaagctcgacaagctgcctcgcgatcgctggctggaactgggcctgaccgacgaagagaaacaaaatcagctggaacagctggctgagcagtatgacgaactgaaacacgagttcgagaaaaaactcgaagcgaaacgccgtaaaatcacccaaggcgacgatctggcaccgggcgtgctgaagattgttaaggtatatctggccgttaaacgccgtatccagcctggtgataagatggcgggtcgtcacggtaacaagggtgttatctctaagatcaacccgatcgaagatatgccgcacgatgctaacggtacgccggtagatatcgtactgaacccgctgggcgtaccgtctcgtatgaacatcggtcagatccttgaaactcacctgggtatggctgcaaaaggcatcggcgataagatcaacgccatgctgaaacagcagcaggaagtcgcgaaactgcgcgaattcatccagcgtgcttacgatctgggcgctgacgttcgccagaaagttgacctgaataccttcagcgatgaagaagttctgcgtctggctgaaaacctgcgtaaaggcatgccgatcgcaacgccggtattcgacggtgcgaaagaagctgaaatcaaagagctgctgcagctgggcgacctgccgacttccggtcagatcaccctgtttgatggccgcaccggtgaacagttcgaacgtccggtaaccgtgggttacatgtacatgctgaaactgaaccacctggtcgacgacaaaatgcacgctcgttccaccggttcttacagcctggttactcagcagccgctgggtggtaaggcacagttcggtggtcagcgcttcggtgagatggaagtgtgggcgctggaagcatacggcgcggcctacaccctgcaggaaatgctcaccgttaagtctgatgacgtgaacggtcgtaccaagatgtataaaaacatcgtggacggcaatcaccagatggaaccgggcatgccggaatccttcaacgtactgttgaaagaaattcgctcgctgggcatcaacatcgaactggaagacgagtaattctcgctcaaacaggtcactgctgccgggttaacgcccggcagcggaatgtgctaactccgacgggagcaaatccgtgaaagacttattaaagtttctgaaagcgcaaactaaaaccgaagagtttgatgcgatcaaaattgctctggcttcgccagacatgatccgttcatggtctttcggtgaagttaaaaagccggaaaccattaactaccgtacgttcaaacctgagcgtgacggccttttctgcgcccgtatttttgggccggtaaaagattatgagtgcctgtgcggtaagtacaagcgcctgaaacaccgcggtgtgatctgtgagaagtgcggcgttgaagtgacccagactaaagtgcgtcgtgagcgcatgggccacatcgagctggcatgtccgactgcgcacatctggttcctgaaatccctgccgtcccgtatcggtctgctgctggatatgccgctgcgtgatatcgaacgtgtactgtactttgaatcctatgtggttatcgaaggtggcatgaccaacctcgaacgcaaccagattctgacggaagaacagtacctggacgcgctggaagagttcggtgacgaattcgacgcgaaaatgggcgcagaagcgatccaggcgctgctgcgcaatatggatctggagcaggaatgcgagcagctgcgtgaagagctgaacgaaaccaactccgaaaccaagcgtaaaaagctgaccaagcgcattaagctgctggaagctttcgttcagtctggcaacaagccggagtggatgatcctgaccgttctgccggtactgccgccagatctgcgtccgctggttccgctggacggtggtcgtttcgcgacgtctgacctcaacgatctgtatcgtcgcgtgatcaaccgtaacaaccgtctgaaacgtctgctggatctggctgcgccggatatcatcgtacgcaacgaaaaacgtatgctgcaggaagcggttgacgccctgctggataacggtcgtcgcggtcgtgcgatcaccggttctaacaaacgtcctctgaaatctttggctgatatgatcaaaggtaaacagggtcgtttccgtcagaacctgctcggtaaacgcgttgactactccggtcgttctgttatcaccgtaggtccatacctgcgtctgcatcagtgcggtctgccgaagaaaatggcgctggagctgttcaaaccgttcatctacggcaagctggaactgcgtggcctggccaccaccatcaaagccgctaagaagatggttgagcgcgaagaagctgtcgtttgggatatcctggacgaagttatccgcgaacacccggtcctgctgaaccgtgcgccaaccctgcaccgtctgggtattcaggcattcgaaccggttctgatcgaaggtaaagccatccagctgcacccgctggtttgtgcggcatacaacgccgacttcgatggtgaccagatggctgttcacgtaccgctgacgctggaagcccagctggaagcgcgtgcgctgatgatgtctaccaacaacatcctgtccccggcgaacggcgaaccaatcatcgttccgtctcaggacgttgtactgggtctgtactacatgacccgtgacagtgttaacgccaaaggcgaaggcatggtgctgactggcccgaaagaagctgagcgtatttatcgcgccggcctggcctctctgcatgcgcgcgttaaagtgcgtatcactgaatacgaaaaagacgacaatggtgagtttgtcgcgaaaaccagcctgaaagacacgaccgttggccgtgccattctgtggatgatcgtaccgaaaggtctgccgttctctatcgtgaaccaggcgcttggtaagaaagcgatctccaagatgctgaacacctgttaccgtattctgggtctgaaaccgaccgttatttttgcggaccagacgatgtacaccggctttgcttacgcagcgcgttcaggtgcatccgttggtatcgatgacatggtcatcccggagaaaaaatacgaaatcatcagcgaagcggaagcggaagttgctgagattcaggaacagttccagtccggtctggtgaccgcgggcgaacgctacaacaaagttatcgatatctgggctgcggcgaacgatcgtgtatccaaagcgatgatggataacctgcaaaccgaaaccgtgattaaccgtgacggtcaggaagagcagcaggtttccttcaacagcatctacatgatggccgactccggtgcgcgtggttctgcggcacagattcgtcagctggctggtatgcgtggtctgatggcgaagccggatggctccatcatcgaaacgccgatcaccgcgaacttccgtgaaggtctgaacgtactccagtacttcatctccacccacggtgctcgtaaaggtctggcggataccgcactgaaaacagcgaactccggttacctgactcgtcgtctggttgacgttgcgcaggacctggtcgtcactgaagacgactgcggcaccctggaaggcatcaccatgacgccggttatcgaaggtggcgacgttaaagagccgctgcgcgatcgcgtactgggtcgtgtgactgcggaagatgttctgaagccgggtaccgcggatattctggttccacgcaacacgctgctgcatgagcactggtgtgacctgctggaagcgaactccgttgactccgtcaaagtgcgttccgttgtatcctgtgacaccgactttggcgtctgcgcgcactgctatggtcgtgacctggcgcgtggccacctcatcaacaaaggtgaggctatcggcgttatcgcggcacagtccatcggtgagccgggtacacagctgacgatgcgtacgttccacatcggtggtgcggcatctcgtgcggctgctgaatccagcatccaggtgaaaaacaaaggtagcatcaagctcagcaacgcgaagtcggttgtgaactccagtggtaagctggttatcacttcccgtaataccgagctgaagctgatcgacgaattcggtcgtaccaaagagagctataaagtaccttacggtgcggttatggcgaaaggcgacggtgagcaggttgccggcggtgaaaccgtcgcaaactgggatccgcacaccatgccggttatcaccgaagttagcggtttcatccgtttcactgacatgatcgacggccagaccattactcgtcagactgacgagctgaccggtctgtcttcgctggtggttctggactctgcagaacgtaccgcaggtggtaaagatctgcgtccagcactgaaaatcgttgatgctcagggcaacgacgttctgatcccaggcactgatatgcctgctcagtacttcctgccgggtaaagcgattgttcagctggaagatggcgtacagatcagctctggtgacaccctggcgcgtattccgcaggaatccggcggtaccaaggatatcaccggtggtctgccgcgcgttgcggacctgttcgaagcacgtcgtccgaaagagccggctatcctggctgaaatcagcggtatcatttccttcggtaaagaaaccaaagggaaacgtcgcctggttatcaccccggtagacggtagcgagccgtacgaagagatgatcccgaaatggcgtcagctcaacgtgttcgaaggtgaacgtgtggaacgtggtgatgtggtttccgacggtccggaagcaccgcacgacattctgcgtctgcgtggcgtacatgctgtgacccgttacattgttaacgaagtccaggacgtataccgtctgcagggcgttaagattaacgataagcacatcgaagttatcgttcgtcagatgctgcgtaaagccaccatcgaaagcgcaggcagctccgacttcctcgaaggcgagcaggtggaatactcccgcgtcaagatcgcgaaccgcgaactggaagcgaacggcaaagtgggcgcaacgttctcccgcgatctgctgggtatcaccaaagcgtctctggccaccgagtccttcatctccgcggcatcgttccaggagaccactcgcgtgctgaccgaagcagccgttgcgggcaaacgcgacgaactgcgcggtctgaaagagaacgtcatcgtgggtcgtctgatcccggccggtaccggttatgcgtatcaccaggatcgtatgcgccgtcgcgctgctggcgagctgccggcggcaccgcaggtgagcgtggaagaagcgtctgccaacctggcagagctgctgaacgcaggtctgggcggttctgacaacgattaatcgttgatgcactgctaaaaagccggtcaggtttcctgaccggctttttttattgtctatttttcgccgctttcccggccattaattacatttacgacatattaaatcttcattttcttagcaattaattcatgaaaaatatctattagaagcctttttctaaaacctttctttatgtatgggtaaaacttctactcatatcaaaaaataatcaattcaaagggtatatattcaaaatacctgatgaatcatgggattacttctgttgctgtatcttcggcgcgacggcgctggagagggatcgccgcatctcatgcttctcccggtcaggcgcagaaataatcccgagaggcaggtagggatcatttttagatctgagtggacaggctttgggggctgcatggaattcgcgatacaactcattattatattaatttgtctgttttatggtgcccgaaaaggaggtattgcgctggggctgctgggcggcatcggtttggtgatcctcgtctttgtttttcatctccagccgggcaaaccgccggttgatgtgatgctggtgatcattgcagtggtagccgcctcggcgactctgcaggcgtccggcgggttagacgtgatgctgcagattgccgagaagctgctgcggcgtaacccgaaatatgtttctatcgtggcgcctttcgtcacctgcacgctgaccatcctctgcggtaccggccacgtggtgtataccatcctgccgattatctacgatgtggcgattaagaataacattcgtccggagcgtccgatggccgccagctccattggcgctcagatggggatcatcgccagcccggtctcggtggcggtggtatcgctggtggcgatgctgggaaattttacctttaacgggaaacacctggagtttctcgatctgctggcgataaccattccgtccacgctgctgggtattttagccatcggtatcttcagctggttccgcggcaaagacctggatcaggacgaagccttccaggcgtttattgcgctaccggagaaccgccattacgtctatggcgatacggcgacgctgctggacaaaaagctgccgaccagcaactggatagcaatgtggatttttctggcctctatcgccgtggtggcgctgcttggcgctttttctgaactgcgcccggcctttgacggtaaaccactgtcgatggtgctggttatccagatgtttatgctgctctccggagcgctgatcatcatcattacaaaaactaacccggcatcgatttccaaaaatgaggtctttcgttcgggaatgatcgctatcgtcgcggtgtacggcatcgcgtggatggcggagaccatgtttggcgcgcacatgaccgagattaaaggcgtgcttggtgaaatggtaaaagagtatccgtgggcttatgccatcgtgctgctactggtttcgaaatttgtgaactcccaggcggcagcgctggcggcgattgtgccagtagccttggccatcggcgtcgacccggcctatatcgtggcttctgcgccggcctgctatggctactatattctgccgacctacccaagcgatctggcggcgatccagtttgatcgctcagggaccacccatatcggccgctttgtgattaaccacagctttatcctgcccgggctcatcggcgtcggcgtctcctgcgtgtttggctgggtattcgcggcgatgtacggctttctgtaagaaggacgggcgccggcagcgacgcccgttaaatccgtgagattattgcgcgaggggcagacgacgatagagttcaatcatgtcggtcgccagatcctgaatgaccatagcgttcatcagatggtcctgggaatgcacggtgatcaggttgaccggcaatttaccgctgccttcatccatgccgataagctgggtctgaattttatgcgcatgtttgacgaactcatgggattcagccatggcctgctccgcggcgacaaaatcgcctttgcgcgccagctgtagcgccgtcagcgccgcgctacgtgcggaacccgcgttaaccagcagctccatgatgatcgtttctaaatcttccatcgattactccagcatcttaagggctttatccagaacggcatcacctttcatcatgccgtagtccatcatatcgatcacggcgaccttcttgccgaacgggtcggccagcgcctgcagcttcgcctgctcatatttcacctgcgggccgagcaaaataatgtcggcggcggccagattatctttaaactcagcgaccggtacggccttgatagagacctcaacacccttcttctgcgcggcatcttgcatacgctgaaccagcatgctggtagacataccggcggcacagcacaaaacgatattcttcatagtcagtggcccttgtgttccgtgatgtcttatctttatcgcggccctggcgatgcgacaaccgctttaccgtgattgtgtgtaaggcatcacacaataattgaaaccggtttcattttttccggaaaaaataaaaaagcccaccgaagtgggcggtggcggcgctgaagtcttacgcgcgcaggatacggtttttaccctgctgtttggctttgtacagcgcttcatcgacgctcaccaccagcttatccagtggctccatattccattccccgaggccggcgctgaaggtgaccgtcaggccatcttcgcgccaggtgcgtcgttcgacgtttacccgccatgtttccagcagcgtgcgggcgttatcgatatgttcggcaggaaagaccaccgcgaactcttcgccgccgtagcgatagagggatatctccagcggctggaggacctgtagcccttcgcgagcgacgttacgcaggacgatatcgccattgagatggccccaggtgtcgttgatcgatttaaagttatcgatatcgaccagcgcgagggcgaatggctggtgatcgttcatcagggcggcaatatcgctgtcgaaggcgcggcggtttttgcagccggtgagagcgtcgatggtcgcctggcggacgtaggacagttcgcgctgtttattggtttcaatcgctttactcagcatcgcctcaaggcgcggggcgcgtttgacgtcaccggttttaatcgcattgatgatattcatcagcacggtacgggaagcatgacgcagataaagaccgaacaggataataatgatcgctgcgagagtgaaaccgccgatcactaaattggtctcatgacgtgtcagattgaccagggtggcgttatcgacacggaaaatcacaaaccagtcgggattggtaaaggagtaatagtaataccaggtgtcgctcccgggatcgtaaagctgcccctctccgctggtcattttatccatcagctcgtccctgacgaagggtttaaacagcgcgcccgggtcggagtgcaggaccactttgccatcccgttgcaccacaaaaaattccccctgtacgggcgccaccatctggcgcagcgcgaaccccatggaggtgagatcgagatgaaaggccaggctgcccttgagtttcccttccggggtaatgatgggtttgaaaatggtaatcgtcggatggtgggtgaaataatccatatacggactggtgtagtggctgaaggtgctggcttccgcctgtttgataaaccagggccgcgttttgggatcgaaagcccggctgtcttcgttttccagcacctccggggcgcgcagatagtggccctcggtatccgccagcgagatggatgagacgcttggcatcatgttctgtaactgcatcagcgtggttaaccctttctccggctccacattgactgcgcgattcagttcgtcattgcgggcaaagaaggcggctgcgcgcccgaggataaaatcattttcccgcagcagggtttccgtatagttgatcgccaggttatgggtaaaattgcggttaatatcgtgataatcttcgagaaaatctttctgttgcgccagagtcacaaaaatagcgatcagcataaaactgagcaaaataccggcaaaccccacgacgatcggcgtcgtaaaagagagctttctattgtgtagagccatgaatcgttaatcgtcccggatgtataaaccatgggtccgaacgcaggttgcgtctgggacgcctgccgatcgaatcagttcactattgctcaattataactctgaggccttcatgtatcgtgatttatattcggcgataatgtgcaggcctctgctcagcgcggagaggcagggcgaaaatgaggaagaaaaggttcgccctggtcagcgtccgctgctgacccgggcagaatagaaaaacggcgtcgggcgggccagcctccgtttttcatctctcgtgcaggcgcgcaaaattatcaggcgtttacactgtacatcatgaggtttgcgaagcgcgtcccagccagctatcccagtctttccataccggctgcaggccgcgggcggccagcgcgctggcgacctcttcagggcggcgatcgtcgtgcggggcaaattgctcgagctccggatgatcgtcggcgtagccgccgggctgggttttagagaaggcgctgacgttattgatcgccagcgggatcacccggtcgcggaaccagggtgattcgcgggtggatagcgacagctcaacctctggcgccagcaggcggaaggcgcagatagtttgcactagctggcgctcatccatcagcgaagccggttcaataccgccggcgcagggacgcaggcgcgggaaggagaccgaatagcggctgcgccagtagcgctgctgcagccacagcaggtgctcagcgactataaagcagtccactcgccagctgtcggaaaggccgatgagcgcgccaaggccgatcttatcgatccccgccgcgcctaagcgatccggcgtatccagccgccagaagaaatcctgcttttttcctttcagatggtgtttggcgtacatgctttcatgataggtctcctgatagaccatcaccccgtcgagccccagggttttcagctcggcatactcttcagtcgccagcggctgcacctccatatgcagcgaggcaaactggctgcggatagccggtaggtgctgacggaaataatccattcccaccttaccctgatgttcgccggtcaccagcagcagatgctcaaagcccaggttgcggattgcggcgcactcgcgggcaatctcggcggcatccagcgtcttgcgcttaatgcggttgctcatcgagaagccgcagtaggtgcagtcgttagcgcacaggttggagagatacagcggcacgtagaagctgacggtattgccgaagcgctgccgggtgaggcgctgcgcgcgctgggccagcggttcaaggtaattggccgcggcaggcgagagcagggccatcatatcatcgcgggtgagctgtttggccgccagcgcccgttcgacgtcggcggcggttttgctgttgatgcgcaggcggatatcgtcccactccagctgccgccagcgatcgctaaaggttttcatgccagcgcctccaggaatccggtgagcgggctggtggcctgcgcctgcgtactgcgtgcccccggtccggcctgacgcgccagtaatccggcatcgatcgccatacggaaggcgcgggccatggccacggggtcgtcggcgacggcaatggcggtattgaccagcaccgcgtccgcgcccatctccagcgcctgcgccgcatggctcgggacgccgatcccggcgtcgaccaccaccgggaccgtcgcctgctcgataataatctccagcatggctttggtttccagcccctgattggagccgatcggcgcacccagcggcatcaccgccgcgcagcccacctcttccagtcgtttacacagcaccggatcggcgccgcagtagggcagcaccacgaacccttcgcggaccagcagctccgccgctttcagggtttcaatcgggtcgggcagcagccagcgggcgtccgggtggatctccagcttcagccaatgggtacccagggcttcccgcgccaggcgggcggcaaacaccgcctcttccgccgtcttggcgcctgaggtattcggcagcaggttaacccccgccgccagcagcggggcgaggatggcgtcattgcgctggcgtaaatcgacgcgcttcatcgccagggttaccagctggctgcccgaggcgcgaatcgcctcaaccatcacctccggggcggcgaatttgccggtaccggtgaaaagatgggattcaaacgttttgtctgcaatacgtaacatgtcagcctccagcgataacctgaaaaagcaggacccgatcgccttcctgcaagagatgatcttcccaccggtcgcgcggcaggatgtgttgattgagcgccagcgcaacgcccggctgctgctgttcgagctgggtcagcagggcgctgacgctgagattgtcggcgcacgccagcggctcgtcgttaaaccagatctgcatgccgccctccgcacaccgggcagctccgggagcgctgtagcgcaagggcgcgccagttgctggtgcgggcgtcgaacagccgcagggtgttgcgcggcgtcgccatgccgctgagcagcttaatcgtctccagcgcctgcagggtgcccatcatgccgaccaccgggccgacgatccccgcggtgcggcagttgcgctgcggttcatcgctttccggccacaggcagcgatagcagccctgcctccagggcggggtgagcaccatcagctgaccgccgaagcccacggcgctggcggttactaacggggtatcgagggccacacaggcggcattgatcgcctggcgggtgaccatattatcggtacagtccagcaccacgtccgctttcgccacttcggcgcgtagcgcctcgccgcttaagcgctgctggagcgctaccagtttgatctgcgggtttagctggctgagccgggtctgtgccgctgcggcttttggccgatcgatatccgcgctggtgaacaagatctgccgttgcaggttgctgagatgcaccgcgtcgtcatcggccagggtcagcgtcccgacgccagccccggccagatagagcgccgccggggagcccagcccgccaaggccgataatcagcactcgactggctaacagcttctgctgcccttcgatggcaatatcctccagcagcagctggcggctatagcgcataaagtcgtgatcattcatcgcccgctcccgccagcgccagcagttggtcggtcgctgcccgccagtccgccgcctgggtgatggcgctgaccaccgcgatgctgccgacgccggtcgccagtacccccggcgccttttccaggctaattccgccgatcgctacggtggggtaatccgccaggcgttgaatatgtctggcaagctgctcgaggccctgcggcgcggaaggcatctgtttggtttgcgtcgggaagacgtgacctagcgcgatgtaagaggggcgcgccgcaagggcgacatcaatttccatatcatcgtgagtagagacgccaagacgcagcccggcctggcggatagcgctcagatcggtggtttccagatcttcttgtccgagatgcacgccataggcctgatgcttaatcgccagctgccagtaatcgttaatgaacagtcgggcgtgatagcggcgaccaagggcgatggcggcgatcacgtcatcctccacttcgctgtcgcgccggtctttgatgcgtaactgaagggtacgtaccccagcttcgagcaggcgctcaatccacgccacgctgtccaccaccgggtagagtccgagacgaaacgggacgggtggaaaatcaggttgatacatcaggcttcctcctgtttcaggtagatttcgccgccgcgggcgcggaagttattcgacatatcggccatgccggcttctatactttgcttcgcggcgtagtcgcggacctcctgagtgattttcatcgaacagaatttcggcccgcacatggagcagaagtgggcgactttgccggactcctgcggcagggtttcatcgtgataggcccgcgcggtgaacgggtcgagcgcgaggttgaactggtcttcccagcggaattcaaaacgcgcttttgacatcgcgttgtcgcggatctgcgccccgggatggcctttcgcgaggtcggcggcgtgggcggcgattttgtaggtaatcagcccctgtttgacatcctctttgttgggcaggccgagatgctctttcggcgtgacatagcacagcatggcgcagccgaaccagccgatcattgccgcgccgataccggaggtgaaatggtcgtagcccggcgcgatatcagtggtgagcggccccagggtgtagaacggcgcttcgtggcagtgctccagctgttcggttatattgcggcggatcatctgcatcggcacgtggccagggccttcaatcatcacctgcacgtcatattcccaggcgattttcgtcagttcgccgagggtgcgcagctcggaaaactgcgcctcatcgttggcatcctgaatggagccggggcgcaggccatcgcccagcgacagcgacacgtcataggcggcgcagatttcgcagatttcgcggaaatgctggtagaggaagttttcctgatgatgcgacaggcaccacttagccatgattgagccgccgcgcgagacgataccggtcaggcgcttcgccgtcatcgggacgtagcgcaacagtacgccggcgtgaatcgtgaagtagtcgacgccttgctcggcctgttccagcagggtatcgcggaagacttgccaggtgagattctcggcgatgccgttgaccttctccagcgcctggtaaatcggcacggtaccaatcggcaccgggctgttgcgcaggatccactcgcgggtttcgtggatatagcggccggtggagaggtccatcaccgtgtcggcgccccagcgggttgaccagaccagtttctcgacctcttcttcgatggaagaggtcaccgccgagttgccgatattggcattcactttcaccaggaagttgcggccgataatcatcggttcagactccgggtggttgatgttggcggggatgatggcgcgtccggcggccacttcatcgcgaacgaactcgggggtgatgttttccggtaggtgggcgccgaagccttcacctgcgtgctgctggcgcagaacctcgctgcggatacgttcgcgacccatgttttcgcgaatggcgatgaactccatctccggggtgactatcccctggcgggcgtagtgcagctgggtaacgcatttgccagcgacggcgcgtttgggcgtcagcaggccgctgaagcgcagctcatcgagaccgtcgtcggccagccgcgctttggtataggccgagctgcgttcgctgagcggcgcgcagtcgttacgcgcgtcgatccacggctggcgcagctttgccagcccctggcggacatcaatgctaatatccgggtcgccatacggcccggaggtgtcatacaccgggatcggttcgttggtttcgtaccgggggttatctttatcgccgccgacgagagttgggctgagctgaatttcacgcatcgggacgcggatatccgcttgtgagccgtgaacatagatgcggcgtgaattaggaaaagcggtacccgccagcgtatcaatgaatcgctgcgcgtgctcgcgttgttcccgacgggttagtttggtagtagacatagcgcattccagttaaaaaaggacatggcttgtcagacgacggatggagtaacagatgcgatcggccctgacggactgacgcgaacagcagtttactcttgttcccttcgcaggtattagcctgatcaggttccgcggatcccgaattaacggtctcagccttttccacgttagcctgcgcatggaaaataggcactccgacaagatgaaatccctccgcagagggataatgtacgtaaattacgcgttaacggttcacaactcaagcggtcggcgcaatattatcgcgcacgtcattgctcaggttatgggcgacagctagggcgatcagtttatcttccagcgcgaaacgcgcctccagcgactcgccgatatccgacagcgcctgctgaaattcaagatagttatcgtgatcgatggcgttttcgaggcaggtatcgtagtagtccatcatctgctgggtattggcttccagctgcgggtaaagccgggtggcggctaaaagaggggtatcgccttccatttcgccaataatgcgttcataaatactaaaatgaccggatgagaggtaatccaccagactttggcaaaagtcatccagcgccttttcgtttagccgcataaacgactctttgcccggtttcaggccaaccaggttgtagtaagccacgagcagatgcttacgcacttgtagccagcgatcgaccagttcattactaccgccaacgcgctccgtcagattttccagctggtttagcatgattgactccgctagttttgatttaaatctgctcaccaaaatgtaaatataatgttaacaacatgccagtgaagcaaaggtagtgcaatagatatggatcgtattattgaaaaattagatcgcggctggtgggttgtcagtcacgaacaaaaattatggttgcctggtggagaattaccacatggcgaagcggttaatttcgatcttgtcggccagcatgcgctgcatattggcgagtggcagggcgagtccgtgtggatggtgcgccaggatcgtcgccatgacatgggatcgttgcgccaggtgctggatcaggatccgggactcttccagctggctgggcgggggatccagctcgccgaattttatcgctcgcataaattttgcggttactgcggccacccgatgcatgccagcaaaagcgaatgggcgatgctgtgcagccactgccgcgaacgttactacccgcaaattgccccctgcattatcgtggcaatccgtcgcgacgatgcgatcctgctggcgcaacatacgcgccatcgcaacggcgtgcacaccgtgctggccggctttgtcgaggtcggcgaaacccttgagcaggcggtggctcgcgaggtgatggaggagagcggtattcgggtaaaaaatctgcgttacgtgacctctcagccatggccgttcccgcagtcgctgatgaccgcctttatggcggattacgcagatggcgagatcgtggtcgacaaaaaagagttactgaccgcggactggtatcgctatgacgacctgccgcttctgccgccgccggggacagtggcgcggcggctaatcgaagataccgtcgcgatgtgtcgggcagagttcgagtgacatgttacactgggcgtatcaacgctaaaggaatgtaaaaatgaccgaactgaagaacgatcgttacctgcgcgcgctgctgcgtcagccggttgatgtcaccccggtgtggatgatgcgccaggcgggccgctatttaccggagtacaaagccacccgtgcgcaagcgggcgactttatgtcgctgtgtaaaaatgccgagctggcctgcgaagtgacgctccagccgctgcgccgttacccgctggacgcggcgatcctcttttcggacatcctgaccatcccggacgccatggggctggggctgtactttgaagctggcgaaggtccgcgcttcacctcgccggtaaaaagtaaagccgacgtcgacaagctgccgatcccggatccggagcaggagctgggctatgtaatgaacgccgtgcgcaccattcgccgcgaactgaaaggcgaagtgccgctgatcggtttttccggtagtccatggacgctggctacgtacatggtggagggcggcagcagcaaggccttcaccgtgattaaaaagatgatgtacgccgagccgcaggcgctgcatgcgctgctggataagctggcgaagagcgttaccctgtatctcaacgcgcagatcaaagccggcgcgcagtcggtgatgatttttgacacctggggcggggtgctgaccggccgcgactatcagcagttctccctttactacatgcataagatcgtcgatggcctgctgcgggaaaacgaaggccgccgcgtgccggtgaccctgttcaccaaaggcggtggtcagtggctggaagcgatggcggagaccggctgcgatgcgttgggtctcgactggaccaccgatattgctgatgcccgccgtcgcgtgggtaacaaagtagcgctgcagggcaatatggatccgtcgatgctctatgcgtccgccccgcgtattgaagaagaagtggcgaccattcttgccggctttggccagggggaaggccacgtctttaaccttggacacggtattcatcaggacgttgaccccgagcatgcgggcgtctttgttgaggctgtgcaccgtctgtccgcaccctatcaccagtaggagataagccctatggatttagccgcactacgtacccaacagcaacagttagccgcgtcggtagagcgtgcggatcgactggatcgcgacccgccggcgttgatcggcggcgcggacgtcgggtttgagcaggaaggggagatcacccgggctgcgatggtgctgctgacctggcctgagcttgagctggtggagtatcaggtggcgcgggtcgccacctctatgccctatattcccggctttctctcgtttcgcgaaacgcctgcgctgctggcggcgtgggagcagctttcgcaaaaaccggacctgctcttcgttgacggacacggcatttctcatccccggagattgggcgtcgccagccattttggcctgatgattgatgtgccgactatcggagtggcgaaaaaacgcctgtgcggcaaaatcggcgacctgggtgatgagcctggcgcgctggccccgctgatggataaaaatgagcaactggcctgggtctggcgcagcaaagtgcgctgcaacccgctgtttattagcaccggccaccgggtaggcatggacagcgctttaatgtgggttgagcgttgcatgcgaggctaccgtctgcccgagccgacgcgctgggccgatgcggtggcgtcccgtcgtccgtcgtttgtgcgttggcaagcaaatcacagctgattcaggtacactgcgcctaatttctgacttcgagaattcatcatgttacaaaacccgattcacctgcgcctggagaagctggaaagctggcagcatgtcacttttatggcctgcctgtgcgaacgtatgtatcccaactacgcgatgttctgcaagcaaaccgagtttggcgacggcctgctttatcgtcgtatcctggacctgatctgggaaacgctgacggttaaagatgcgaaggtgaatttcgacagccagctggagaagctggaagaggcgatcccggcggcagatgatttcgacatgtacggtgtctatccggccatagacgcttgcgtggcgttgagtgaactgattcattctcgtctgagcggcgaaacgctcgagcacgcgatcgaggtgagcaagacctccatcaccaccgtggcgatgctggaaatgacccaggaaggtcgcgaaatgaccgacgaagagttgaaagcgaatccggcggtagagcaggaatgggatattcagtgggaaattttccgcctgctggccgactgtgaagagcgtgatcttgagctgataaaaggcctgcgcgcggacctgcgcgaggctggcgagagcaatattggtataaattttcagcagtgagaccagaaaacgtgatttaccgcctgaattgtagcgtctgaaggcttccattccgccccccgtctggtctacatttggagggcgaaaaaaagtggctatcggtgcgtgtatgcaggagggtgcttttttggcatttccgtcgcactcgatgcttagcaagcgataaacacattgtaaggataacttatgaacaagactcaactgattgatgtaattgcggacaaagctgacctgtccaaagcacaggctaaagctgccctggaatctaccctggctgcaattactgagtctctgaaagaaggtgatgctgttcaactggttggtttcggtaccttcaaagtgaaccaccgcgctgagcgtactggccgcaacccgcagaccggtaaagagatcaaaatcgctgcagctaacgtgccggcatttgtttctggcaaagcactgaaagacgcagttaagtaagaccgcgtggcagtgaacagttttatcgaaggggctattaagccccttttgtctgtctggcgccggcctctggcgctggcgggcatcctgttgctgactgcctgcagccacgacacgtcgctaccgccgtttaccgccagcggatatgcggacaatcagggagcgatgcgcatctggcgtaaagattctggcgatgaagtccatcttctcgccgccttcagcccgtggcgtcacggggacacctcgaccagcgaatatcgctggcagggcgatcaactggcgcttatcgaactcaatgtctatggcaaaccgccggaacatattcgcgcccgtttcgacgcgcagggcgatctgagctttatgcaacgggaagtggacgggcagaagcagcagctctccagcgaccaggtcgcgctatatcgttatcgcgccgaacagatccgccagaccagcgacgccctccgccaggggcgggtcgtcctgcggcaggggcgctggaacgctgccgcgcataccgtgctgacctgcgaagggcagacggttacgcccgacctcgatagccgggccctggcgcacattgaacgccgccagagccacgcttccgccgctgtgagcattgcctggctggaggcgccggaaggctctcaactgctgctggtcgccaatgaaaacttctgcacctggcagccgacggaaaaaagcttctaacctttaccagtggttcatgcccatatgaccgccggcgctaccgcgacagccgccatatcccattcctgcgccgcggggaacgcctgcctcagccagggcgatatcaaacttcacccgctgctgatccagcttctggcgtaagccttccatctcctgagcgacagcttcaatcttcccgctgtccggcttttgcgccgtgagcagcgcattgtactcatagcgtttggactgcagctgctggcgcagggcgctggtttgcgcatagtaatcgttatgcagcttttgcacggtagcctgctgctcctgggtcagctgactgtagccctggttgcccatcccgttattgttgccccagtggtggttggcccaggccgcgttgctggcgaaggtcagcgcggcaaaggtaacgagggcgagaggtaaggtacggttccgtttcatggcattttctcctgtgtggtttccctcggtattgcatcttccatgccagtctgaaaaagcccgtctgtgtcggcctgccgaagcctttgccgaggagagcgagtaaaaatgacccgttccgccagggtcaggcgagtcatttttactcgcttaagcgcaggcgatatgtttgagagcaggattggccgcgcggaaacatggcatgatttctgctgaaggagcctgcagatagtgaaaaagagatgacaaggactcgccgatgaagatcaaatctctctcccgggacgccgccgctggcgcgctgagctggctgctgaccggcacggttgtgctgctggtcatgctgttctccgcgatgatcgtccgcgactacggtcgcgagacgaccgctgcccgacaaaccattgaagagaaagggagcgtgctgatccgcgcgctggagtccggcacgcgcgtcgggatggggatgcgtatgcatcatgcgcagctgcaggccctgctggaagagatggcctggcaaccgggcgtcctgtggttcgcggtgaccgatgaaaacggtaaaattatcgcccatagcgatccgcagcaggtgggtaaaacgctgtatagcccggcgcagatgcgtgcgttagcggttggcgaacaggcccgctggcgccggcttagcgaaccgcagccggcgctggagatctatcgccattttcgcccgcttaatccggcccgcggccaccatatgggaatgatgaaccgcggcaatagcgccctggctcaggccaccgtcccgcaggtaatttttatcgcctttgatagccgcgagctggatgccgcgcaggcccgcgggcagcggaatatggccatcatgctgggtgccgccgcgctggtgatagcggcgacgatcctcgctcagttctggttccgccgctatcgtcgctcgcggaaacagctgctggaggcgatggcccgcaaggaaaagctggtggcgcttggccatctggcggcgggggtcgcgcacgagatccgcaacccgctctcgtcgattaaagggctggcgaaatattttgccgagcgcacgtcgcctggcggcgagtcgcatcagttagcccaggtgatggccaaagaggctgatcgcctgaaccgggtggtcagcgagctgctggagctggtccggcccgcccatctaaactaccagacagtcgatatcaacgcgcttatccgccactcattgcagttggtaagccaggatgcgcagagccgcgggatcgcgctgcaatttactccgcgacctgagttaaccacgatcagcgccgaccccgatcgcctgaatcaggtgctgttgaatctgtacctgaatgcaatgcaggcgattggccgtgacggcgtcattcgcgtaacagcaagcgaagccgatcgtcagcgggtgaaaatcgtcgtcacggatagcggtaaggggatgagcgatgaagagttacaggctatcttcacgccgtatttcaccaccaaggcggacggcaccgggctggggctggccgtagtgcagaatattatcgaacaacatggcgggacgatccgcgccgaaagtcagccgggagctggagcgatatttacgctttggttaccggtggatgctcaacggagggaagatgagcagcgataaagtacagattctggtcgttgatgatgacatcagccactgcacgatcctgcaggcgctgctgcgcggctggggctatcaggtggggttggctcacaacggcctgcaggcgctggagcagatccatcagcaggtcttcgacctggtgctgtgcgatatccgtatggcggagatggacggtatcgcaacgttaaaagagattaaggcctataacccggcgataccggtgctgatcatgacggcgttttccagcgtcggtacggcggtagaagctattaagtccggggcgctggattatctggttaaaccgctggattttgacaccctgcagcagacgctggttcaggcattggcgcacacccggcagagcgagagcgaccccagcgttgcgacggattcacggtggggcatgattggcgacagcccggcgatgcaggcgcttcttaacgatattacgctggtggccccttcggacgcgacggtgctgatttatggggagtcgggaaccggtaaggagctggtggcgcacgccatccacgcctgcagcgagcgtcgtgacaagccgttggtcacgctcaactgcgcggcgctgaatgagtcactgctggagtcggaactcttcggccatgaaaaaggggcgtttaccggggcggatcggcggcgggaaggacgctttgtcgaagcggatggcggcacgctgtttcttgatgagataggcgatatctcgccagtgatgcaggtccgcttgctgcgggcaattcaggagcgggaggtgcagcgggtcggcagcaaccagacgcttgccgttgatgtgcggcttatcgccgccacccatcgtaatctggcggaggaggtgagcgccgggcgttttcgccaggatctctattaccgcctgaatgtcgtaactattgatatgccgccgctgcgccggcgacgggaagatattccgcagctggcgcagcattttctcaaacgctataccgaacgcaatcgtaagacggtaaaagggttcacgccacaggcgatggacctgctgatccactacccctggccgggcaatattcgcgagctggaaaacgcggtggagcgggcggtggtgctactgaccggaaactatatctctgagcgagaactgcccctggcgatcgccggtacgccgctgccatcaggcgggagcgaggagggaggaattcagccgttagtggaagtggagaaagaggtgattctggcggcgctggaaaaaacgggcggcaacaaaactgaagccgcccgtcagttaggcattacgcgcaaaacgctgctggcgaaacttagccgttagccttttcacgttcgatggcgcgccagccgatatcgctacggctaaagctaccgtcccagcgaatgtcggtcagcagctgataggcgcgctgctgcgcctgcgctacggagtcacccagcgcggtgacgcacagcacgcgcccgccgttggtgaccacgcgctggtcgtcagacagtttggtgccggcgtggaagaccttaccgtctgcgacttcctgctgcggcaggccgtagatctcatcgcccgtattgtagctgcccggatagccgccggcggcaaccaccacgcccagcgacgcgcggtcatcccactcggaggttttctcgtccagcttgcccgcgcaggcggcgaggcacagctcgaccaggtcggacttcatgcgcagcatgatcggttgggtttccgggtcgccaaagcggcagttgaactcaatcaccttcgggttgccctgcttgtcgatcatcagaccggcgtagaggaaaccggtataggtgttgccttcagcggccatgcctttcacggttggccagataatccgctccatggtgcgctggtggacttcgtcagtaaccaccggtgccggggagtacgcccccatcccgccggtgttcgggccggtatcgccgttgccgacgcgcttgtgatcctggctggtggccatcggcaggacgtgctcgccgtcgaccatcacaataaagctagcctcttcgccatcgaggaactcttcaatcacgatgcggtggcctgcgtcgccaaaggcgttgccggccaacatatctttgaccgccgcttcggcttcctcgagggtcatcgccacgataacgcctttacccgccgccagaccgtcggctttgatgacgatcggcgcgcctttctcgcgcagataagccagcgcaggctccacttcggtgaagttctggtattccgccgtcggaatatgatgacgggcgagaaaatctttggtgaaggcttttgagccttccagctgcgcggcgccttcggttggcccgaagatgttcagcccggcggcacggaacgcgtcgaccacgccaatgaccaacggcgcttccgggccaacgatggtcagatcgatgttctcatcctgcgcgaagcgaagcagcgccggaatatcggtgacgccgatggcgacgttttgcagcgacggctccagagcggtaccggcgttgcccggcgcgacatagacggtatcaaccagcggcgactgagccgctttccaggccagcgcgtgctcgcgcccgccgttgccgattactaatactttcatctgctgctccatgaattaatggcggaagtggcgcatgtcggtgaagatcatggcgatgccgtgttcgtcagcggcggcaatcacttcgtcgtcacggatagagccgcccggctgaataacgcaggtgatgcctaccgcggctgcggcatcgatgccgtcgcggaacgggaagaaagcgtcagaggccatggcggaacctttcacttccagaccttcatcaccggctttaattccggcgattttcgccgagtagacgcggctcatctgaccggcgcctatgccgatggtcatattatctttggcatacacaatggcgttggatttgacgaatttcgccactttccagcagaacagcgcatcgcgcagttcctgctcggttggctgacgtttgctgaccacgcgcagttcacctgcggtgaccatgccgagatcgcggtcctgaaccagcagaccaccgttaacgcgtttgaaatcgaggccggcaacgcgagtatcccactggccgcaggtcagtacgcggacgttctgcttcgcggcggtgattttcagcgcttcttcgctggcggacggcgcgatgatcacttcgacgaactggcgagagatgatcgcctgcgcggtttcagcatccagctcgcggttaaaggcaatgatgccgccgaacgcggaggtcgggtcggttttgtaagcgcgatcgtaggcgtcaagaatcgagtcgctgacggcaacgccgcacgggttggcgtgcttaacgataacgcaggccggctcgttgaactcttttacacactccagcgccgcatcggtatcggcaatgttgttataggagagcgctttgccctgcagctgagtggcggtcgccacggaggcctcttttacattctcttctatatagaaagccgcctgctggtggctgttttcgccgtagcgcatatcctgcttcttaatgaagttcagattcagggtacgcgggaagcggccagcggcttctttgctttcgccgtgataggccggaaccatgctgccgaagtagttggcgatcatgctgtcgtaagcggcggtgtgttcgaaggctttaatggcgaggtcgaagcgggtggccagcgtgagggaaccttcgttggcgtccatctcattaatgatggcgtcgtagtcgctgctcttaaccacgatggcgacatctttatggttcttcgctgcagagcgcaccatagtcgggccgccgatatcgatgttttccaccgcgtcttccagcgagcacccttcacgagcgacggtctgggcgaacgggtaaaggttcacgacaaccatatcgataggcgcgataccgtgttgctgcatgataccgtcatcctgaccgcgacgaccgaggatgccgccgtgtactttcggatgcagggtcttcacgcgtccatccatcatttccgggaaaccggtgtagtcagagacttcggtaaccggcaggcctttatctgccagcaggcgagcggtgccgccggtggacagcagctcgacaccacgagcggaaagcgcctgcgcgaattcgacgataccggccttgtcagaaacactgagcagagcgcggcggactggacgacgttgttgcatggtattaaatccccaggatttgaacattacagagagcgttaggtgagcttttgcctaaaaactcacctaacgcacccaaccgggcatccgtgtcatagcgcggcattgtaacgaaaacgtttgcgcaacgctcgcgaatttttatgtttctctccaggccggtgattctccttctatatagctggcgatccatggggctagcggtcatgtttttacgctctcttgtggataattctgtgtgtaacgaggtataaagcggggttttgctggggaatgcagcagtcagtcatttttctgccatttttctattgcggacgctcgagaactccctataatgcgcctccatcgacacggcggatgtgaatcacttcacacaaacagccggttcggttgcagagaaaaatcctgaaaaacgggttgactctgaaagaggaaagcgtaatatacgccacctcgcgacagagcgctaaagcgcgtcgcaactgctctttaacaatttatcagacaatctgtgtgggcactcaaagtgacatggattcttaacgtcctcggacgaaaaatgaataccaagtctcaagagtgaacacgtaattcattacgaagtttaattctttgagcatcaaacttaaattgaagagtttgatcatggctcagattgaacgctggcggcaggcctaacacatgcaagtcgagcggtagcacagagagcttgctctcgggtgacgagcggcggacgggtgagtaatgtctgggaaactgcctgatggagggggataactactggaaacggtagctaataccgcataatgtcgcaagaccaaagtgggggaccttcgggcctcatgccatcagatgtgcccagatgggattagcttgtaggtggggtaacggctcacctaggcgacgatccctagctggtctgagaggatgaccagccacactggaactgagacacggtccagactcctacgggaggcagcagtggggaatattgcacaatgggcgcaagcctgatgcagccatgccgcgtgtgtgaagaaggccttcgggttgtaaagcactttcagcggggaggaaggcggtgaggttaataacctcatcgattgacgttacccgcagaagaagcaccggctaactccgtgccagcagccgcggtaatacggagggtgcaagcgttaatcggaattactgggcgtaaagcgcacgcaggcggtctgtcaagtcggatgtgaaatccccgggctcaacctgggaactgcattcgaaactggcaggctagagtcttgtagaggggggtagaattccaggtgtagcggtgaaatgcgtagagatctggaggaataccggtggcgaaggcggccccctggacaaagactgacgctcaggtgcgaaagcgtggggagcaaacaggattagataccctggtagtccacgccgtaaacgatgtcgatttggaggttgtgcccttgaggcgtggcttccggagctaacgcgttaaatcgaccgcctggggagtacggccgcaaggttaaaactcaaatgaattgacgggggcccgcacaagcggtggagcatgtggtttaattcgatgcaacgcgaagaaccttacctggtcttgacatccacagaacttagcagagatgctttggtgccttcgggaactgtgagacaggtgctgcatggctgtcgtcagctcgtgttgtgaaatgttgggttaagtcccgcaacgagcgcaacccttatcctttgttgccagcggtccggccgggaactcaaaggagactgccagtgataaactggaggaaggtggggatgacgtcaagtcatcatggcccttacgaccagggctacacacgtgctacaatggcatatacaaagagaagcgacctcgcgagagcaagcggacctcataaagtatgtcgtagtccggattggagtctgcaactcgactccatgaagtcggaatcgctagtaatcgtagatcagaatgctacggtgaatacgttcccgggccttgtacacaccgcccgtcacaccatgggagtgggttgcaaaagaagtaggtagcttaaccttcgggagggcgcttaccactttgtgattcatgactggggtgaagtcgtaacaaggtaaccgtaggggaacctgcggttggatcacctccttaccttaaagaacctgcctttgtagtgctcacacagattgtctgatgaacgtaaagaagcaaggcgtcttgcgattgagacttcagtgtccccttcgtctagaggcccaggacaccgccctttcacggcggtaacaggggttcgaatcccctaggggacgccacttgctggttcgtgagtgaaagacgcgtgccgaactatctcaaaactcatcttcgggtgacgtttgagatatttgctctttaaaaatctggatcaagctgaaaattgaaacgacacacagtcaatgtgtgttcgagtctctcaaattttcgcaatcagaagtgaaacatcttcgggttgtgaggttaagcgactaagcgtacacggtggatgccctggcagtcagaggcgatgaaggacgtgctaatctgcgaaaagcgtcggtaaggtgatatgaaccgttacagccggcgatgtccgaatggggaaacccagtgcaattcgttgcactatcgttaactgaatacataggttaacgaggcgaaccgggggaactgaaacatctaagtaccccgaggaaaagaaatcaaccgagattcccccagtagcggcgagcgaacggggagcagcccagagtctgaatcagcttgtgtgttagtggaacggtctggaaagtccgacggtacagggtgatagtcccgtacaccaaaatgcacaggttgtgaactcgaagagtagggcgggacacgtggtatcctgtctgaatatggggggaccatcctccaaggctaaatactcctgactgaccgatagtgaaccagtaccgtgagggaaaggcgaaaagaaccccggcgaggggagtgaaaaagaacctgaaaccgtgtacgtacaagcagtgggagcaccttcgggtgtgactgcgtaccttttgtataatgggtcagcgacttatattctgtagcaaggttaaccgtataggggagccgcagggaaaccgagtcttaactgggcgttaagttgcagggtatagacccgaaacccggtgatctagccatgggcaggttgaaggttgggtaacactaactggaggaccgaaccgactaatgttgaaaaattagcggatgacttgtggctgggggtgaaaggccaatcaaaccgggagatagctggttctccccgaaagctatttaggtagcgcctcgtgaactcatcttcgggggtagagcactgtttcggctagggggtcatcccgacttaccaacccgatgcaaactacgaataccgaagaatgttatcacgggagacacacggcgggtgctaacgtccgtcgtgaagagggaaacaacccagaccgccagctaaggtcccaaagtcatggttaagtgggaaacgatgtgggaaggcacagacagccaggatgttggcttagaagcagccatcatttaaagaaagcgtaatagctcactggtcgagtcggcctgcgcggaagatgtaacggggctaaaccatgcaccgaagctgcggcagcgacactatgtgttgttgggtaggggagcgttctgtaagcctgcgaaggtgtgctgtgaggcatgctggaggtatcagaagtgcgaatgctgacataagtaacgataaagcgggtgaaaagcccgctcgccggaagaccaagggttcctgtccaacgttaatcggggcagggtgagtcgacccctaaggcgaggccgaaaggcgtagtcgatgggaaacaggttaatattcctgtacttggtgttactgcgaaggggggacggagaaggctatgttagccgggcgacggttgtcccggtttaagcatgtaggctggttatccaggcaaatccggataatcaaggctgaggtgtgatgacgaggcactacggtgctgaagtaacaaatgccctgcttccaggaaaagcctctaagcatcaggtaacatcaaatcgtaccccaaaccgacacaggtggtcaggtagagaataccaaggcgcttgagagaactcgggtgaaggaactaggcaaaatggtgccgtaacttcgggagaaggcacgctggtgtgtaggtgaagtccctgcggatggagctgagaccagtcgaagataccagctggctgcaactgtttattaaaaacacagcactgtgcaaacacgaaagtggacgtatacggtgtgacgcctgcccggtgccggaaggttaattgatggggttatccgtaaggagaagctcttgatcgaagccccggtaaacggcggccgtaactataacggtcctaaggtagcgaaattccttgtcgggtaagttccgacctgcacgaatggcgtaatgatggccaggctgtctccacccgagactcagtgaaattgaactcgctgtgaagatgcagtgtacccgcggcaagacggaaagaccccgtgaacctttactatagcttgacactgaacattgagccttgatgtgtaggataggtgggaggctttgaagcgtggacgccagtctgcgtggagccaaccttgaaataccaccctttaatgtttgatgttctaacgttggcccctgaccggggttgcggacagtgtctggtgggtagtttgactggggcggtctcctcccaaagcgtaacggaggagcacgaaggttagctaatcctggtcggacatcaggaggttagtgcaatggcataagctagcttgactgcgagcgtgacggcgcgagcaggtgcgaaagcaggtcatagtgatccggtggttctgaatggaagggccatcgctcaacggataaaaggtactccggggataacaggctgataccgcccaagagttcatatcgacggcggtgtttggcacctcgatgtcggctcatcacatcctggggctgaagtaggtcccaagggtatggctgttcgccatttaaagtggtacgcgagctgggtttagaacgtcgtgagacagttcggtccctatctgccgtgggcgctggagaattgaggggggctgctcctagtacgagaggaccggagtggacgcatcactggtgttcgggttgtcatgccaatggcactgcccggtagctaaatgcggaagagataagtgctgaaagcatctaagcacgaaacttgccccgagatgagttctccctgagactataagtctcctgaaggaacgttaaagacgatgacgttgataggccgggtgtgtaagcgcagcgatgcgttgagctaaccggtactaatgaaccgtgaggcttaaccttacaacgccgaagatgttttggcggatttgagagaattttcagctctgatacagattaatcgatacgttggtgaaacgtgttgataaaacagaatttgcctggcggcactagcgcggtggtcccacctgaccccatgccgaactcagaagtgaaacgccgtagcgccgatggtagtgtggggtctccccatgtgagagtagggaactgccaggcatcaaacaagtgaagagcccatcctgccggatgggctttttgcgtttctgtcgtccggccagcgtgcgggtatgtccccccggtggcgctgcgcttaccggggctacagatcctcggccacctgctggccgaggggacatcaatgccgcaaagttaccgacgtcaatcgtagtctgcttcagcctgctgctcatacatcaaattcaataacggatacggttgccccagatcgtccgtttcagagcgccctgtcaccctaaaacccatcttctgataaaacccgaccgcttgttcattctgctcatttacattggtcgtcagcttcggcgttaacgacagcgcatgctcaatcagcaacttccccacgccacagccgcggacatccggatcgacgaacagcgcatccatatgttctccggtcagcagcataaaggcgatcggctggtcttccgtattaaccgccacccacagcggagcctccggtaaaaatgcgcgtaccatctcctccagctcctttcgatacgcttttgtcagaaaatcatgcgtggcgtcgaccgaccgacaccagatcgcagtcagtttatccccttcatcaggccgggaacggcggatgttaataaccatactttctccttttctacattcttatattctaactcaacaagcgccgtgaaattttctcaccgtgaacatgcagactcgacattcacccgattcctggttatcttcagctatctggatgtctaaacgtttatacgtatgctatgaggtaatacagttatgccaattcgggtgcaggacgagctgccagccgtcaatttcttgcgcaatgaaaacgtcttcgtaatgacgacaacacgtgcaacgactcaggaaatccgccccctgaaggtgttaatcctcaacctgatgccgaagaaaatcgagacggaaaaccagttcctgcgtctgctatcaaactctccgctgcaggtggatatccagttattacgtatcgatgcgcgcgagtcgcgtaatacccctgcggagcatctgaataacttttactgtaatttcgatgagatctgcgatcagaactttgacggcctgattgttaccggcgctcctttaggcctggttgagtttaacgatgttgcttactggccgcagatcaaacaggtgctggagtgggccaaggatcacgtcacttcgacgctgttcgtctgttgggcggttcaggccgcgctgaacattctgtacggcattcccaagcagacccgcgccgaaaagatttccggcgtctatgaacaccatattcttcatccgcacgccttactgacccgcggtttcgacgactctttcctggccccgcactcacgctatgctgattttccggccggacttattcgcgactataccgatctcgagatcctcgcggagacggaagagggcgatgcgtatttgttcgccagcaaagataagcgcatcgcctttgtcaccggccacccggagtacgatgccaataccctggcaagcgaatatttccgcgatgtggaagccggtttgaaccctgagatacctcataactatttcccacaaaacgacccgcagaacaaaccgcgcgccacctggcgcagccacggcaatctgctgttcgctaactggcttaactattacgtctaccagattacgccatacgatctgcgtcatatgaatccgacgctggaataatactctacgtgagacgatcctaaagcgtttcagcattttgcctctggcaccttcgggtgccttttttatttccgaaattcacttcatacgcgaggataactttaatttcattgttatcaatgtgttaatgataaattaaaattaaaatggaaattgtttttgattttggaaattaattgagtagtcttaattgtgcttagcgaaaactgcacaacgatctttcgctcgcttccagcggatcaaccaagaggagcagcacaatgacgcagcaggcgacaatcaccgatgaactggcctttagtcagccctatggcgagcaggagaagcagatcttaacgcctgaggcggtagaatttctgacggaactggtgagccgctttacgccggcgcgcaataagctgctggccgctcgtttgcagcaacagcaggctattgacgacgggcagcttccggattttatttcggaaactgcttccattagaaatggcgactggactattcgcggtatcccggctgatttgcaggatcgccgcgtggaaatcaccggccccgtcgagcgcaagatggtcattaacgcgctgaatgccaacgtcaaagtctttatggcggactttgaggattcgctggcgcctgactggcgcaaagtcattgatggtcaaatcaacctgcgcgatgccgtgaacggaaccatcagctacaccaacgaggccggcaaaatctatcagttgcagcccaatcccgctgtgctggtatgccgtgtgcgcggcctgcatctgccggaaaagcatgtgacctggcgtaatgaggccatccccggcagcctgttcgattttgcgctctatttctttcataactaccaggcgctgctggcgaaaggaagtggtccctacttctatctgccaaaaacacaggcctggcaggaggcggcatggtggaacgatgtcttcagttttacggaagatcgctttgacctgccgcgcggcaccatcaaggccacgctgctgattgagacgctgccagcggtgttccagatggatgagatcctgcatgcgctgcgcgaccatattgttggcctgaactgcggccgctgggattacatcttcagctatatcaagacgctgaaaaaccatccggatcgcgtactgccggaccggcaggtggtgacgatggataaacccttcctcagcgcctactcacgcttgttgattaagacctgccacaaacgcggcgcgtttgcgatgggcggtatggcggcgtttatcccgagcaaagataccgaacgtaaccgccaggtgctgagtaaagtcaccgccgataaagagctggaggcaaacaacggtcacgatgggacctggatcgcccacccgggcctggcggataccgccatggcggtgtttgaccgcgtgctgggcgataagccgaatcagctctcggtcacccggagcgaggatgcgccaattaccgctgaacaactgctggctccctgtgagggcgaacgcacggaagccggaatgcgcgccaacattcgcgtggcggtgcagtacatcgaagcgtggatctccggcaacggctgcgtaccgatttatggcctgatggaagacgccgcaacggccgagatctcgcgcacctctatctggcagtggatccatcatcagaaaaccctgaacgacggtaccccggtcactaaggcgctgttccgccagtggctggcggaagagctgatggtgattcaggaggagctgggagagcaccgcttcagccacggccgctttgacgatgcggcgcgactgatggagcagatcaccacctccgacgagctaattgattttctgacattgccgggctaccgcctgctggcctaatcgccagatggtgtggttcgccatttagtccttcacctatgagcctggggagccaggaaattatatggagcatctgcacatgaaaacccgtacccaacaaatcgaagaattaaacaaagaatggacgaacccgcgctgggaaggcattacccgtccctacagcgcggaagaggtggtgaagttacgcggctcggtgaatccggaatgcacgctggcgcagcttggcgcggcgaaactgtggcgtctgctgcacggggaggcgaaaaaagggtacgtcaacagtctcggcgcgctgaccggcggccaggccttgcagcaggcgaaggcgggtatcgaagccatttatctctccggctggcaggtggcggcggatgctaacctggcgtccagcatgtatccggatcaatcgctgtatccggccaactcggtaccggcggtggtggatcggatcaacaacaccttccgccgcgccgatcagatccagtggtcagcgggaattgaaccgaacgatccgcgctttatcgactacttcctgccgatcgtggcggatgcggaggccggttttggcggcgtcctgaacgcctttgagctgatgaaatcgatgattgaagccggtgcagcggctgttcacttcgaagatcagctggcatcggtgaagaagtgcggccatatgggcggtaaagtgctggttccgactcaggaagcgattcagaagctggtggcggcgcgtctggcggccgacgtgatgggggtcccgacgctggtcatcgcccgtaccgatgccgacgccgcggatttaattacctcagactgcgatccgtacgatcgtgagtttattaccggggatcgcaccagcgaagggttcttccgcacccacgccgggatcgagcaggcgatcagccgcgggctggcctacgcgccgtatgcggatctggtgtggtgtgaaacgtcgaaaccggatctcgagcaggcgcgccgctttgccgaggctatccatgcgcgtttcccgggcaaactgctggcctataactgctcgccgtcgtttaactggaagaaaaatcttgatgataaaaccatcgccagcttccagcagcagctgtcggacatgggatacaaataccagtttattaccctcgcggggatccacagcatgtggttcaacatgttcgacctcgcccatgcctacgctcagggtgaggggatgcgccactatgttgagaaagtgcagcagccggaattcgccgccgggccggaaggctacaccttcgtctcgcatcagcaggaggtgggcaccggctacttcgacaaggtcaccaccattatccagggtggtacctcgtcggtaacggcgctgaccggctcgaccgaagaagagcagttttaagccatgcccggtggcgcgacgctgaccggtcctgcaagaggacgcaggccggataagcgagcgcgccttccggcatgacgtggcgccggatgggggaaagcgatgacgcgtggtcttgaattactgattgcccaaacgatattgcagggatttgacgcgcagtatgggcgttttcttgaagtcacttccggcgcgcagcagcgctttgaacaggctgactggcacgccgtgcagcaggcgatgaagcagcggatccatctctacgatcaccacgtgggcctggtagtagagcagctgcgctgcatcaccgaagggaaaagcaccgacgtcgattttcttctgcgggtgaaacagcagtacacccaacttttaccggattaccctcgctttgaaattgctgagagctttttcaattcggtctactgccgcctgtttgaccaccgctcgctgacccccgagcggctctttattttcagctcgcagcccgagcgaccctttcgtaccctcccgcgaccgctggcgaaagatttctttccggaacgcggttggtcgcacctgctgggtaaagtactgtccgatctgccgctgcggctaccgtggcaaaacaaagcgcgggatatcggctatatcattgccagtctgcaggaggcgctgggggaggaactgctcgccacctgtcatctgcaggtcgccaatgagctgttctaccgcaataaagccgcctggctggtgggcaaactggtcatgccgatggcgacgctgccttttttgctgccgatccaccgcagcgaagagggtgagctgtttgttgacacctgcctcacaacccatgccgaagcgagtatcgtttttggcttcgcgcgttcctattttatggtttatgcgccgttgcccggcgcgctggtggaatggctgcgcgagatcttgccgggtaaaacgacggccgagctgtacatggcgattggctgtcagaagcacgccaaaaccgaaagctatcgcgaatatctacactacattactcgctgcgatgagcagtttattgaagcgccgggtattcgcgggatggtgatgctggtgtttaccctgccgggctttgaccgggtgtttaaggtgatcaaggaccgcttcgcgccgcagaaagagatgaccgccgcccatgtgcgggcttgctatcagctggtaaaggagcatgaccgcgtcgggcggatggcggacacacaggagtttgaaaatttcgtgctggataaacggcaaatcgcgccggcgctgctggcgctgctgcaggcggaagcggggaacaaactcaccgatctcggcgaccgcatcgtcatcagccatctctatattgaacggcgaatggtgccgctcaacctgtggctggagcaggttaacggccaggcattgcgtgatgcggtagaagagtatggcaatgctatccgccagctggccgccgccaacatctttcccggcgatatgttatttaaaaacttcggcgtcacccgccatggccgggtggtgttctacgactatgatgaaatctgctatatgacggaagtgaattttcgcgagatcccgccgccgcgctatccggaggatgagctggccagcgagccgtggtacagcgtttcgcctggcgatgtgtttccggaggagttccgccactggctgtgcgccgacccgcgcattgggccactgtttgaagagatgcatgccgacctgctgcgcgccgactactggcgcgcactgcagatgcggattaaaaacggccatgtggaagatgtctacgcctaccggcgcaagcagcgttttagcgtgcgctatggcgccgacagtagaccagataaggcgtttacgccgccatccggcaaggtgcgccgatctgcctgatggcgctacgcttatcaggcctacttaaaatgcccttctggggcatttttttatttaaccccgccatacgccagcgtcacttccttcgccgccttgatcaccagcgcgcccagctcagtcacccgatcatcggtcatacgcgagatggggcctgagatggagattgccgcgaacggttcgcgatgttcatcgtaaatgcaggcggcgacgcagcgcaggccgagcgcgtgctcctcatcatcgaaagagtagccccgcttgcgggtctgggctaaatcttccttcagatgcagcggggagaccagcgtggcatgcgtataggcatgcagccctttacggtgcagcagactggtgacctgctcttcgctcagctgcgcgagaaacgccttcccggcgccggaagcgtgcatcggcagtttaccgccgattggcgccgacatccgcatcagctgggtgcactgcacctgatcgataatgatcgcctggtggtcgctctggtcgagcaccgctaaattcaccgtttcaccggaatcttccatcagctggcgcaggatcgggtggacaatggccagcagattgcggctttgtagaaagctgctgccgaccacgaaagcatgcgcccctacggcccagtgacccagctcgccaacctggcggacgaagcccagctgttgcatggtggtcagcagacggtgagtcgtggagttgggcagacccgcctgctgcgccagttcggtcagcgcgacgctgctgtgggactcggcaatccattcgagtaatttcaggccgcgggtcagcgactgaacctgaccgccagcctgctgggcagtggcagccgcgggttttctgccgcgtttcgcgggaatgggggttgtggccatcgcgaactcctttttctgtatcgtggaaataattttcgttttatttggcaataatgcaatcacaaccggactcatcggaggagtgaagctgaacatgtctcatattgcccgttgttgtcttttccgctccggtggtttatgccagtatggtttgttggctatttggcctgagtcgagcgttgtcgggagcaagtgtgagcagcaaagttgagcaactgcatcagcagttaaaagaacgtattctggttctggatgggggcatgggcaccatgatccagggctatcgtctgagtgagcaggactttcgcggtgagcgctttgctgactggccgtgcgacctgaaaggcaacaacgacctgctggtgctcagcaaacccgaagtgatccgcgagatccacgacgcctatttcgaggccggcgcggatatcattgagaccaacacctttaactcgacgaccatcgcgatggcggattaccagatggaatccctgtcggccgagatcaactttgccgcggcgaagctggcccgcgccagcgccgacgcctggacggcccgcacgccggaaaaaccgcgctatgtcgcgggcgtgcttggcccgaccaaccgcaccgcctctatctcgcctgatgtgaacgatccggcgttccgtaatattacctttgaccagctggtggccgcctatcgcgaatccacccgggcgctggtggaaggtggcgtggatctgatcctgattgaaacggtgtttgatactctgaacgctaaagcggctatatatgcggtgaaagaggagctggaggcgttaggcgttgacctgccgctgatgatctccgggaccattaccgatgcctctggccgcacgctttccggacagaccaccgaagccttttataactcgctgcgtcacgccgaagccttatcgtttggtctgaactgcgccctcgggccggacgagctgcggcagtacgtccaggagctgtcgcgcattgccgaatgctacgtcaccgcgcacccgaacgccggccttcccaacgccttcggcgaatacgatctggacgccgacaccatggcgacgcaaattcgcgaatgggcggaagccggtttcctcaatatcgttggcggctgctgcggtaccaccccggagcatatcgccgccatgagccgggcggtagcgggcctgccgccgcgtcagttgccggaaattgcggtggcctgccgcctcgccggcctggagccgttgaatatcggcgacgatagcctgttcgttaacgtcggtgaacgaactaacgtcaccggctcggcgaaatttaagcggctgattaaagaagagaagtacagcgaagcgctggacgttgcgcgtcagcaggtggaaagcggcgcgcagattatcgatatcaacatggacgaggggatgctcgacgcggaagcggcgatggtgcgtttccttaacctgattgccggcgagccggacattgcccgcgtgccgatcatgatcgactcctccaagtgggaagtcattgaaaagggcctgaaatgtattcagggcaaaggcatcgttaactcgatttcgatgaaagagggcgtcgaatcctttatccaccatgcgaaactggttcgccgctacggcgccgcggtggtggtgatggctttcgacgaggttggtcaggccgacacccgcgaacgtaaaattgagatttgccgtcgcgcctacaaaatcctaaccgaagaggtcggcttcccgccggaagatattatcttcgaccccaatatctttgccgtcgccaccggtatcgaagagcataacaactacgcacaggactttatcggcgcctgcgaagacatcaaacgcgagctgccgcatgcgctaatctccggcggggtctccaacgtctccttctccttccgcggtaatgacccggtacgtgaggcgatccacgccgtattcctctactacgcgatccgcaacggcatggacatggggatcgtcaacgccggtcagctggccatctatgatgacctcccgggcgagctgcgcgacgcggtcgaagacgtgatcctcaaccgccgcgatgacagtaccgaacggttacttgagctggcggaaaaatatcgcggcagcaaagcggacgacggcgcgaatgcccagcaggcggagtggcgcacctgggaagtgaaaaaacgcctcgaatattcgctggtgaagggcattaccgaatttatcgaacaggacaccgaagaagcgcgtcagcaggccgcccgcccgattgaggtcattgaagggccgctgatggacggcatgaacgtggtcggcgatctgttcggcgaaggcaaaatgttcctgccgcaggtggtgaaatccgcccgtgtaatgaaacaggcggtggcctaccttgagccgtttattgaagccagtaaagagcagggctccagtaacggcaaaatggtgattgccacggtaaaaggcgacgttcatgacattggcaaaaacatcgtcggcgtggtgctgcagtgcaataactacgaaatcatcgatcttggcgtgatggtcccggcggataaaattctcaaaacggccaaagaggtaaacgcggatctaattggtctttccgggctgattaccccatcgctggacgagatggttaatgtggcgaaagagatggagcgccagggctttaccatcccgctgctgataggcggcgcgaccacctcgaaagcgcatacggcggtgaaaatcgagcagaactacagcggcccgaccgtttacgtacagaacgcctcgcgcaccgtcggcgtggtgtctgcgctgctctcggacacgcagcgcgacgagtttgtcgcccgcacgcgcaaagagtatgaaacggtgcgtatccagcatgggcgtaaaaaaccgcgtacgccgccggtgacccttgccgccgcgcgggaaaacgatctggcctttgactgggagagctacacgccgccggtggctcatcgtctgggagtacagacggtggaagccagtatcgagactctgcgcaactacatcgactggacgccgttcttcatgacctggtcgctcgcgggtaaatatccgcgcattctggaagatgaagtggtaggggaagaggcgcagcgcctgttcaaagacgctaacgagctgctggataagctgagcgcagagaaaaccctgaacccgcggggcgtggtgggtctgttcccggccaaccgcgtgggcgacgatattgaaatctatcgcgatgaaacccgcacccacgtgctgacggtgagccatcatctgcgccagcagacggagaaggttggcttcgccaactactgcctcgccgattttgtcgcgccgaagctgagcggcaaggcggactacatcggcgccttcgccgtgaccggcggcctggaagaggacgcgctggcggatgcctatgaagcgcagcatgatgactataacaagatcatgatcaaggccatcgccgatcgcctggcggaggcctttgccgagtatctgcatgagaaagtgcgcaaggtttactggggatatgcggccaatgagaacctcagcaatgaggagcttattcgcgagaactaccaggggatccgaccggcgccgggatatccggcctgtccggagcataccgaaaaggggaccatctggcagctactggacgtcgaagcccataccggcatgaagctcaccgaatcgttcgccatgtggccgggcgcatcggtttccggctggtacttcagccatccggatagcaagtacttcgccgtggcgcagatccagcgcgatcaggtcgaagattacgcgctgcgtaaaggaatgacgccggcggaggtcgagcgctggttagcgcctaatctgggctatgatgcggactagtcgtcatctttccttacaacaaacaaggcgctctgtgagcgccttgtctctttattgaggttaaccccttatactgagataggttcctgaacttcggaaaacctataacgataaggagaagctgattccgtgttaactctgctacacctgttgtccgcggttgctctgctggtgtggggcacgcatatcgtgcgtaccggggtgatgcgcgtctatggcgctcgcctgcgtaccgttctcagtagcagcgtagagaaaaagccgctcgccttctgcgcgggtcttggcgtgactgcgctggtgcaaagcagtaacgccaccaccatgctggtgacctcatttgtcgcccaggatttagtgggtctgatgccagcgctggtgatggtgctgggggccgacgtcgggacggcgctgatggcgagggtgttgaccttcgacctgtcgtggctgtcgccgttgttgatatttatcggggtgattttcttcctcggccgcaagcagacccgcgccgggcagcttggacgggtggggattggtctggggctgatcctgttggccctcgagctgattgtccaggccgtacaccccataacccaggcgaacggtgtgcaggtgattttcgcctcgctgaccggcgatatcatgctggatgctttgattggcgccgtatttgcaatcattagctactccagcctggcggcggtgctgttaacggcgacgctgaccgcggcgggagcgatctctttcccggtggcgctgtgtctggtgattggcgccaacctgggatcggggctgctggcgatgcttaacaacagcgcggcgaacgcggcggcgcgccgggtggcgctgggcagcctgctgtttaagctggtggggagtctgattattctgccgttcgtccatccgctggccgcggcgatgcaaaagctgccgttggccgagtccgagctggttatctacttccacgtcttttacaacctgctgcgctgcatcgcgatggtgccctttgccggaccgatggcgaagctgtgccagcgtctgatccgcgatgagcccgagctggataaccatctcaaacccaagcatctcgacccgtcggcgctggacaccccggcgctggcgctggccaatgccgcgcgtgagacgctgcgcattggtgacgcgatggagcagatgctggagagcctgcacaaggtgatgcatggcgaaccgcgtcaagagaaagagctgcgccgtatggcggatgatatcaacgtactttacaccgctattaagctctatctggcgcgaatgccaaaggatgagctggcggaagaggaatcccggcgctgggcggaaattattgagatgtcgttaaacctcgaacaggcgtccgatatcgtcgagcgaatgggcagcgagatcgccgataaatcgctggcggcgcggcgcgccttctcggtagaagggttaaaggagcttgatgcgctgtacgatctgctgctcagcaacctgcagctggcgatgtcggtcttcttctccagcgatgtgcccagcgcccgccgcctgcggcgcagcaaacaccggttccgcattcttaaccgccgctactcgcatgcgcacgttgaccgtctgcatcagcagaacgtgcagagcatcgaaaccagtacgttgcacctggcgctgctgggggatatgaagcgtctgaacagcctgttctgctcggtggcttacagcgtgatggagcagccggatgaagacgacgaacgggatgactactgagacggattatttttccgtttatgtcgcttcttttctggcgaggtagccctcccgggacgtggctgacgccttcccgggagggacatcctagcttctggcaaacgccgaggcctctgccaccagcgcgctatccggccgtacgccggtataaagggcaaactgctcgacggcttgcagggcaataacttccgcaccgctgatggtttgcttaccccgttgttgcgccaggcggatcagcggagtttccgccggcaacgcgaccacgtcaaacacgacgctggcctgggccaccatggcctcgctgaacgccagcgtgttgctttccgctccccccgccatgcccagcggtgtgacattgaccagaatctcggctgcgatcccttcgggcaggggctgccactgaaagccatactgttttgccagcgccaggccgcgctggcgattgcgggccgcaatgatcacgtcgcggaaaccggcatcacggaaggcggcaatgacggctttccccatgccgccgctaccctgaatcatcactctggcgttggtatcgagccgatggctggcgatcaggcttttgaccgcgatgtaatcggtgtttagcccggttaacttcccgtcgtcgttgacgatggtgttgacggagtcgatgacttttgctgacggatcgatcgcgtcaagaaacggtatgcagctctctttaaacggcatggagaccgcacagccgcggatacccaatgcgcgaaccccttttaccgccgcctcaatatccttagtcgtaaaggctttgtagaggtagttcaatcccagcttgtcatacagatagttatgaaagcgggtgccgaagttgccggggcgacccgccagggagatgcacagcagcgtatcgcggttaatcatgcgtaatatcctccgcgtgggccagcagatacgcttcagcctcctgggaccagatcccatggtgacgcgccacaatcgctgccagttcgggatcggcgatctcgcccagcggcgtgagcgggaaggcttttccggtatacaccagcttttttcccccgccgacggcaggcagatcgagggtggtttcgcccgcggcgttcaggccgagaatatgggtgaccactttcgccgtctggacctttttcgcctgcatcagcgccaccgcggcgcgcatatcgtcagtattaccgccggaggtgccgacgtagtgggtaaaggcgtagtgcacgtcgtagaagttgatcggggcgctgaattgcttatcctgggggccagcaaagaaattcaggcagccgtccggagccagcaacgaggaggccagggtgatcagctgttcgtttggcacaaacacgaagatatcgtcgaagccatggccgccgctgagcgccagtagcgtatcgcgactggcctcatggccgtcgaggtagtggatcagcgtctgcggctcagaggggtaatgacggcgggcgtagctgagcttcggcttattggtatcggtcactaccagtagtgaaggattgatggggccgtgcagcgcatagtcgatagccagcagccccatcggccccgtcccgcccaggatcagagtgtgtccctgaggacggatccccatcacgtggttgtaactcccctcctgcagatgataattggcgttgaaagcgccaatgacgcaggagagcggctccaccagcgatccttcaaaccaggtatccccctcccaggtgagcaggcaatcctgcgccatcacctcattggggatcaccacatgggtggcttcgccaccgatccatgggaatgagtagccggggcagtcgggtcggtcgggcaactgcaggttggcctggatcacgtagcgctgccctggctgaaacttatgctgccactttttaccgacggcaaggatttcgccgcagaattcatgaccgataataatgggcctggtggccacatcatctggcacctttttatgatcggcaccctgattggcctctttccatgaggaaagacacaggctgtccgtgaccacccgggcgaggatctcatcgtcctgcatcgccgggagggtaaaggtttccaggcgcaggtctcgtttgccatacaggcgcagggccgttgttgtttgcataaaccacctcatccccttcatctttcggggctatgttgttgacgtcaccccggcatcgccggggcggaataatcaggacagaaagccgagggcgttgccgataatgcctaagccgaaaagggcgaaaatcagccagaccggattcactttcttgttcagcagacgcaccatcagtagcgtcaggcccagcgccagcaggccggggcagagctgatcgaggatgttctggacggtcatcgtgacggtggcgccgtctgcaccgggcgtttgggaaaccaccagcggcacattgatggtggtccatttggtcaccagcacccccatgacaaacaggccgagaatggaggcgccttcggtcagcttctgcagcaggttaccgcccatatcgctgacgatattgacccctttacggaagcccagttgcaggccgtaccacttcattgccagccgcactgcattgaaaataaagaaaaataacaaaggtcccagaatgttgccggagagggccagcgaggcgccaagggccgcggtaatcggccgcagcgtgccccagaccagcgggtcgccgacgccggccagcgggcccatcagacccactttgatgccgttgatagcgccatcgtcaatggccgcgccgttagcccgggcctcctccatggcggcggtgacgccgatcaccgggccacacaccgccggcgtggtattaaagaacaccagatgacgcttcagcgccgcgacctgatcggctttgagcggataaaggcgtttgatcgccgggatcatgtcgtagcaaaaccccaggccatgaatacgttcgaagttaaaggaggcctgctggaggttggagcggagaaacatgctcaccaggtcgccttgcgtgatttttttctgttccattttcggctccattagtcgtcaagctggtcaagggcgggggcagagggggcagtggaggcggcgggttcagctttacgccactgtggattgagctggatgtagatcagcgcgatgatgacgcccacgccgccgaaggccagcaggctgaagtcgagataacccccggcgagaaaaccgaggaaaaagaagggcatcaggtatttcacgcccatcattcgcagcaccatcgcgtagcccacgacgacaatgaaaccaccggcaatctgcaggccgcgggtgacgaattccgggatcgcgctgagcatactgctgaccatatccgcgctaacgaacagcgagaccaccagcgccgggattgccacgcgcagtgcctgcacccccagtgcggagacatgcagcaggtcgatggtgcgaaagcgcgcctcctcggccgctttgtccgcggcgtgctggaacaccacggtaatggtacgggcgaaaacggtcagcacctgcccggcggcggccaccggcagagcaatggcgataccggtggcaatgctctggtggcccacaatcaccagaatggcggagataatgctggccagcgccgaatctggcgactgcgctgcccccacgttcatccagccgagggcgatcagctccagcgtaccgccgagcataaccccggtttttaaatcgcccaggatgaggccaatcacggtacaggcgataaggggccgatgggtctgaaattcatccagcacgctgcccattccggcaatacaggaaaaaataaatatggctattatctgtagggtactaatttccataatttatgacctttaaggtgtgagtcatcctgcctgctacggcatatcacaacaggcgctattttttattcgcagaaagctgtttcgttaattttgtcgagaatattgactgacggatctgatgcgaccacgcgtaaatcgagttttacgcccagtttatcgagttcacggaatgcctgaatatcctgcggatccaaagaaacggctttggttagctgttttttaccgggtcgccaggccatgccaccaatatttaacgtggcgatctgcacgccctggcgcaccatcgttaaaacatcgtgtggattggtaaataaataaaagacggtctcgtcctgatattgcgggttatgatagaccgcaaccgctttttccagactgacaacgtttaccttcatgcctggcggagccgcctggcgcaacagggtccggcgaacctcatcgttaaatacatcgtcattgcagataattatccgctgggcgttggcgacttttgaccacacggtggtgacctggccatgaatcagtcggtcatcaatacgggcgagggtaatttgcatcagaactcctcctcaacggtttctggctgctgccagaccacacagcactgactggcgatggcctgcagatgctggcataagtcatcggcgctcagggtatgctggttatccaccagctcgagtgccagcggcagcgacaggccgctaatcacccggatctgcgggtgacgcattgccagcccggctgcggcattccatgggcttccgcactgcaaatctaccgcgattacccactcctcatcggtgtgggcgcttactaacttttccaggttaatggcgatatccgccgcgttttcgccggggacaaacgcgacggcgctgacgttaacctcgccgtagaccatgcataccgaatcaagcatggccccggccagctggccgtgggcgcagaagatagcgtgaaccatactgcctccttaaccgcgcgtttttccgccggcaatgttagtggtgactccggtgatgtagctggcgcgcgctgacaagagatagcaaacaaaatcagccacttccgagagctttcctgcccgcccgatgggaatggcgtttttggtatatccctcgcgaagttgctcgacggtgatattgcgcgtccaggccagcgcctcttcatattccggtgtccgcagaccggttttttcgaggatccccggcgcaacgccgaccacgcggatcccatatttacccaattctttggaccaggagcgggtaaagctgttgagcgcggccttggtcgcggcgtagcagctttgaccttcagaaccttccaggccgctctccgaagagacattgacaatcacaccggcgcgctgtttgaccatttgacgcgccaccgcctgcgacatgaaaaacacccctttctggttgatattgaccattttttcaaaagcggcttcgtttaattcatagcggccggccggtgctttttcgtcgactaataaacgcgggaaattcacgccagcgttattgaccaaaccatcaatacgcgaccagcgctgaataatggcatcgatagtctgttgcacctctgtcgcgctggaaatatccgtcggccagaagtgataattatcgccattgtgatgacgatcgccgccatgaatatcaatcatctggacatgagcaccttgtgataataattcatcgacaatggccagcccaattcccgaggcgccgccggtcacgataatgacgttatcttttaaatttaaccaggtattcattattcactcccatttctttagataaagggatcccccgcagcgggtgctgcgtgaaatcatatcctgtgtgttatttcagtaataactcagccgtttctctgtttgtcaccagacaattaatatagcgtccgtgcaatgcgccaagaatgccagagtatttctcttcccccatggcgatgccgatggaatagcgagcctggcgcagcttcgccatttcgatcgacagggttttttcgctcatattggtatcgactaacccgccgttaatatcgtagaaacgcgaacagatatccccggcgacgtggcgggcgttgagatcgtcgctctcttcgctgccgtagaaggcgtgccagtttgcgccgtcgcgaatggccggtgaaccaatacccaccagcgccacatccaggctgtcccagtaggatgagatggttttaaagtgctgggactgcatgatgccgttgcggatcagcgggttatccagcagggctggaaaatcggcaaggtgggattccgctttcagtctggctgccgcgccgtaggttaaggtgttcacatggtagcggctctccagtttaccggaaggtccaccgatgatggggacgcagatcacctggcgtgactggctggcctgcggcaggttctccaccagcgaacgcacggcgcggccccatgaaaaaccgatgatatcgcctggctccagcaaccgatcgacaagcagggcgccatgctggcccatcgcactcagctgttcttcttccagcagcccatcgctgctggcaaccaccgcctctttcaggccaaatttttgcttgagctgttgctcgagccacaggttttcattgtagtcatagttgatggcgatggtaacaatgccctgctcgcggccgcgcttcagcaggcgactgatggtggtgcgatagatccccagctcgcgagcaatttgcgcctgagtcatatcctgctcgtaatagagctgggcgattttgacaatcaaccggatatcgtcactgttttccatggtcatctgcaggctcctgcacatttgtgcaaatcgcgggtttgtgctgttgatctgatataaccctattagagccaccgtttaaagcgattttcttttatttcatcaccctaatctggcgaataatcttgcacatttgcgttatcaatagcgggttattggcacctttgtgcattgcacgctaaatctctgattctgtgatatttcatcatgcaaagttgccaggcgttgagcgggacacttttgtgaaaaaaggcgtagtcgatcacaccttgcgccggagggcgcaaaggcacatcttttttctcgcccacaaggtagggtatatttcgcttttacaggagaatctatgctgcccgactcatcaacccgattaaataaatacatcagcgaaagcggcatctgctcgcgtcgcgaagcggaccgctttattgaacaaggcaacgtctttatcaatggcaagcgcgccactattggcgatcaggtgaagcctggcgatttagtcaaagtgaacggacggttgattgagccgcgcgaagcggatgatctggtactgattgcgctgaataagccggtcggcattgtgagcaccaccgaagatggcgagcgcgacaacattgtcgatttcgtcaaccacagcaagcgtatctttcctatcggccgtctggataaagactcccaggggctgatcttcctcaccaaccatggcgatctggtgaacaagatcctgcgcgccggcaacgaccatgaaaaagagtatctggtcacggtcgataagccggtgaccgatgagttcattcgcggcatgggcgcgggggtaccgattctcgggaccgtgaccaaaaaatgtaaggtaaagaaagaagcgccgttcgttttccgcatcactctggtgcaggggctgaatcgccagatccgtcgtatgtgcgagcactttggctatgaagtgacgaagcttgagcgtacgcggatcatgaacgtgagcctgacggggatccccttgggtgaatggcgtgatctaaccgatgacgagctgatcgacctgttcaagctgattgaaaactcctcttccgaagcgaagccgaaagccaggccgaaggccaaagcggcgactcccggcatcaagcgcccggtggtgaagatggaaaatagcaacgataagggccgcccggctggtaacgggaaacgtttcacccagccgggacgtaaaaagaaagggcgttaacgcctgccgcgggtcggcgtattcgccgaccaggaaaaggtcgcttccttatccgttttataagcctgctgttttctcacctggcgggctttcttcgcttccgcttcacgctgcgccatcagcttatcgatatattcctttttcacgctgttcgtttccgcattgctcagcgggcggccatgcgcaatacgcgcgcggtcaagcagcgttttcaattcgcgctgttcgcgctcggtcatctctttttgtgtaatacgggggagtgccatggtggtgccctcagtcagaccagagcacccagtgtacggcaatgaatattttactgatagcctgtatggcaactaaagcaggcacacgcccaggcctgcgcccggacgtatcaaactcagcgcttgtcggcttttttggcgatgggctttcctgaccagtacccggccagcagcgaaccggacaggttatgccagacggagaacagcgcgcccggcagcgccgccagcgggccgaagtaaattttacccagcgcggccgccaggccggagttctgcatccccacctcgatcgccagcgtacggcaggtggattcatcaaaaccaaacagacgtccgccccagtacccgccaagcagaccaatagtgttatgcaggatcaccgcgataatcaccaccaggccgacggaggcgatatgggcggcggaacccgccaccaccgcgctgatgatcgccagaatgcacaccatcgagaaggcgggcaggaacggctctaccgctttcaccaccttcggcagcagatgatggacaatcagtcccagcgcgataggaatgaccacaatctgcagaatgctgagcaacatgcccatgacgtcgacctgaatatgcgcgtcgacgtacagacgggtgagcagcggtgtcgccacgacgccgacgagggtggagaccgaggagatggtcaccgacagcgccacatcccctttggcaagaaagatcatcacgttggaggcggtcccgctggcgacgctgccgaccagcaccatcccggcggaaagctccggcggcatatgaaacagcagcgccagcagccaggcggcgagcggcatcaccagatagtgcagaaatatccccgcagcgaccggcgccggacgcgacaggacgcgtttgaaatcctccagcttcagatgcacgcccataccgaacatgatcagcatcagcagggtggtgacccatgggccaattggggtgaaggtggtgggagtgtaataggccagaacggagagcagcagtgcccataacgggaacagccgcgtcagagttgcgagcatgttgtgttccttgcgatacgcgaaccgggccgcgccatcccgatgggcggcgagcaggtcagctggttgtgttgatgttgttataaaaaagccgggttcgagcccggctataggtattgtttaacgtgctaaggaattttattcaaacaaattatgatgcagcttctgcacaaccttctccgcatcgtcgcccggcaccaggaagcacaggttgtggctggaggcgccatagcagatcatgcggatgttaaacggctcgaggacgccaaagacctctttgccgacgccgcaggctttcgacagctcattgccaatcagggcgaccagcgccagattttcttccacttccacgcggcacagcgaagagagctcggtcagcagcgcctgggtcagcagggtatcgcccgcagaggtcgagccggtggtgtccatggtcagggccacgctcacttcggaggtggtgatcaaatcaactgagatgttatggcgcgccagaataccgaacacttcggcgaggaagccgcgggagtgcagcatattcaggctgtgcagcgtcagcagcgtttgccggcgacgcagcgccagcgcgcggaacagcggcgggttctcggtggttttacacaccagcgtaccgcccgctttaggctctttactggagccgacaaacaccgggatatcgctgcgcacggcaggcagcagggtcgccggatgcagcactttggcgccaaaggtggccatttccgctgcctcttcaaaggcgatgacgtcgatgcgtttcgccgccggcgcgacgcgcgggtcggtagtatagatccccgggacatcggtccagatatcgacgcgggtggcattcagcgcttcgccgagcagagcggcggtataatcgctgccgccgcggccgagggtggtggtgcggcctttcgcttcgctgccgataaagccctgggtcaccaccaggccttccgccaggcgcggcgccagctgctgctgggtcagttcggcgacggcggcgatgtccggttcggcgcggccaaagcgatcgttagtgcgcagcactttacgggcgtcaaaccactgcgcctgaataccgcgttcacgcagaatttccacaaacagcagggtagacatcagttcgccatggctgaccagttcgtcagtcagggcggttgaggaggcgagcgcggcggcttccgccagcgtcgtgatattttccagcaagcgctcaatctcttcgcggatcacgttgggataacgcaaacgctccagaatattgaactggatctgacgcagagcgtccagctgggaaaaacgttcggtgggttccagccctcccgctaaggccaccagaatgttggtcacgccggcagaggcggagagcacaacaatacgggtattggcatcgagcagcgccacatcgatgctgcggttcattgcgtcaaaatcagcaacgctggtgccgccaaatttggcgacgactagatctgtcataacaacctcgtgtcagggggcctgacttattaaaacgattcctgagcaccgatcctggcaggggctggacgccgccggatcgcaacaaaatgtcttaataagccaggccaaattattcagccatggcacaagggaagagcgataaacagggtggcgcagagtgataaacaactacgatgtcacccagaagtgctccaccttgtagacccgactcaccgctttgggcgctgaggtgttcgggtatgaaacgcccgactgcgaacgtttctggtgacaacccaggggattcagcccctgtggccggcgaggagcgtgaccagacgctctttcacctcggcgttgctccccctcacgtatcttccccggactggttcctccaatacggttacctgggcaacgcacctcttctggcaattactgacgtctttcacctggccgggggaacagggacattatatcccccgcgaataccctttcgctgtagcgtgaaatgcgcgagcaatagatacctaccaatacgtaagcactgcggatatataaaggcttaacgccagctatgtcaacgctgcggttatgcggatttttcatgcctctgcggctaacagaaaaaagccttatgatagctatactaatggggctttttactccgttttgacccgattcctgaccggcgtcagggtcaagtcacaaaaatcatcacaattttccgtcaccggcgctacaatcgaccgaagtcacaatctcaaatcagaagagtattgctaatgaaaaacatcaacccaacgcagacctctgcctggcaggcattacagaaacacttcgacgaaatgaaagatgtcactatcagcgagcttttcgccaaagatagcgaccgtttttctaaattttccgcgacgttcgacgatctgatgctggtggacttctccaaaaaccgcatcactgaagagacgctggctaaactgcaggatctggcgaaagagactgacctggcgggcgctatcaagtcgatgttctcaggtgagaagatcaaccgcaccgaagaccgcgcggtactgcacgtcgcgctgcgtaaccgcagcaatacgccgattgtggttgatggcaaagatgtgatgccggaagtgaacgctgtgctggagaagatgaaaaccttctccgaagcgattatctccggtagctggaaaggctacaccggcaaaccgatcaccgacgtggttaacatcggtatcggcggctccgacctcggtcctttcatggtgaccgaggcgctgcgtccgtataaaaaccacctcaacatgcactttgtctctaacgtcgatggcacccatatcgccgaagtgctgaagaacgtgaatccggaaacgactctgttcctggtggcgtccaagactttcactacccaggaaaccatgaccaacgcccacagcgcgcgcgactggttcctggcaaccgcgggcgacgacaagcacgtggcgaaacacttcgccgcgctttccaccaacgcgaaagcggttggcgagttcggcatcgacaccgccaacatgttcgaattctgggactgggttggcggccgttactccctgtggtcggcgattggtctgtccatcattctctccgtgggcttcgacaacttcgttgagctgctgtccggcgcgcatgcgatggataagcacttctccaccactccggcggagaaaaacctgccggtgctgctggctctgatcggcatctggtacaacaacttcttcggtgcggaaaccgaagcgattctgccgtacgaccagtacatgcaccgctttgccgcttacttccagcagggcaacatggagtccaacggtaagtatgttgaccgtaacggccacgcggtagactaccagactggcccaatcatctggggtgagccgggcaccaacggtcagcacgcgttctaccagctgatccaccagggcaccaaaatggtaccgtgcgatttcatcgctccggctatcacccacaacccgctgtctgaccaccatcagaaactgctgtctaacttcttcgcccagaccgaggccctggcctttggtaaatcccgcgaagtggttgagcaggaatatcgcgatcagggtaaagacccggcgaccctggagcacgtggtgccgttcaaagtgttcgaaggtaaccgcccgactaactccatcctgctgcgtgagatcaccccgttcagcctcggggcgctgattgccctgtacgagcacaaaatcttcacccagggcgcgatcctcaacatcttcacctttgaccagtggggcgttgagctgggcaaacagctggctaaccgcatcctgccggagctgaaagacggcagcgaagttagcagccacgacagctctactaacggcctgattaaccgttataaagcctggcgcgcataacgcttgcgcagctaagacggaatgccgaccctttggtcggcatttttatttatagccgccgcagcagcctcgccggattccccgcccacacgcctttctcggtaatggacttcgttaccacgctgcccgcgcctatcaccaccccatcgcagatgctgacggccagaatcgtggcgccgctgccgatcgacacgtcatcgccaatctcgatccgcccccagctggcgcggtcggcgtttggtttaccctcgcgaaacaggtcgttggcaaacatcacgccgtgaccgataaagcagcgctggccgatggtgacgtactcgcagataaaggtatgggactgaattttactgttcgcgccgatgcgggtattccgctggatctcaacgaacggcccgacgaagacgttatcgccgagctggcaatcatagaggttggcgggctggtaaataacgacattttccccacaaacgacgttacgtacgccggtatcacgaagctcaggcatagttcctctcaaatcggtttggccagaatatgtaaggtgctttgctggctggcggagtggaaaatcgtgtctctgatgtgctgcatcccctggcgttcgtaaaaacggcgcgcggcgggattcgcggcgagtacttccagccacagccaactttcaccggccgtttttgctcgcgtctcgacggcgtgaaaaatatgctcgccgtagcggtggccagtcttccccggcatcaggtagagcttatgcagcagcgtaccaatcttgccgtcgtcagccattcgctgctgatagctatatttagcgaaaccaacaggagagggggcttcggcgatgagccagtgttgggtcgcatccgcaagactccgacgtagcgcatcttcggcatattcttgcttaagaaataacgccagttcatcggcatcgcgccagagatgagcaaagtggtgatgatagctggcatagcccatcgcgctaagctggggcgcgtcctcgggacatgcctgtcgaatagttaacatgctgcgttcctcgcgtcgttctgcggctatattgcctgtaaagtgaacaatgtggaacgacaaaaatcggtgggagaaggctggaggcgctccctccagcctgggggttagcgggcgaaagcgatcgcttcgatttcgacgccggcatctttcggtaaccttgccacctccacacaggagcgcgccggaaaggccgcctggtgttcgataaagaaggcctcgtaggcggcattgatggcggcaaaatccgccaggtctttgacaaacaccgtagttttaacgatctgcccgaccgtgagtccggcggcttcgacgatggctttcacgttctccagtgattgccgcgcctgttcggcgatatcgcctggcatggtgccgtccagcggattaatcggcagctgaccggaggtgatggtcatcgcgccgagattgacgccctgcacgtacgggccgatagcggcaggcgcgtcagcggtggtaataatcatacggtttatccttcaaacggttacataaaataatttaacaacaccagcgagccgacgccgctcactaccacccacaccagacctaaacggaagctggcgagcgtgcagatgatggcggcgatcaccttcggattttttaagtcgaactccatgctggaattcacgctcaggatctaaatggtgatgatggccggcagaacagtgaccggcacgaagcgtagcgttttggtcacccgctcggacatctggatcttgccggccaggccgataaacgagaaacggatgagaaaagtcaccgcggccatgcccagcgtcagggcgataaaatagctattactcattttccatcgcctccactaacggcatatcggattcggtttttgccatctgcttgcgctcttccgccaggtcgacgcacaggccggcgaggacgccaagcactgaggcgacgacgatacccagcgaatagggtaggaccactaacagcacgccggaaacggcggctacaaccgcggcgacggtgcaggcctggcttttaatttgcggcaccacgatggcgataaaggcggcgaccatggcgaaatcgagaccgtatttctcaatgtggggaaacgaggcgccgaccagcgcgccaagaaaatcagccagcacccaaatcgcccagaaggtaatcatcgccgaaccataaaacagatatttttcctttttatttccttccatctctttgacggtggtggcatacacctcgtcggtgagcgcataggacataaagcattttttaaagaatgaagcttcacgcacgctgccggaaatagaggcgctatacagcacgtggcgaagattgataattaatgtggtgaaaataatcacgccgagcgtggcgccggtttttaacatattcagtgccagcatttgcgccgagccggcaatgacgatcgccgaccacgccgtactctgccagacgctcatgcccgcgctaacgcttaatgcgccgacaataaatgaaaatggaaagtcgccgatgcataggggcataatagcgctggcgccgcggaagatgacttttttattcatctgctatacctgctaatttataaataatagtgtgggtagagtacgttaatcgggacctgctctttcaggcccgtgaaatggtattatttagcgaccataatgctgataatttctttatcggtgagagtcattggtttaatcaccagacggcacaggttattaatagtctgctcgacatcggcgcagacaataccgtcattggcgccagcgcagctattttgcatggccattagtaccgccttaaaggcgctggataccactgacgagactttcatcgcgcagctgttggaaccgccatcacaaatcatgccggtaatatcgctgaccatattaataattgcggtattaatggtgttgatatcgcgggtaaacagccaggccataccggcggcggcgcccatagcggcggttgaggctgcgcatagcgcagataagcgcgtataacgagaatgaattgagatggcggtgagatgagatagagacaaagcgcgagccagggtctcttcatcgacgccgagatgctctgcaaccaccactaccggtatggttgctgtaatgccctgattgcctgagccgaagttagacatcgctaccaccggcgcgccgcccatgcgggcatctgaagcggcgacggtgttgatgatcaccttgcttaacagatcgttgctcatcaggccgtttttcactgcgtcagaaaaggtaccgttaatgttcaggccatatttttttgttttgccttctgccgccagcgcggagtttaagcgcgcggcgtcgagaataaagcgaatatcattaaagtcgacgcgattaataaagtcgtaagcctgttgtagcgagaaagtgggcagcgtttcgcgctgggtgtgcgtattctgtttttcgcttaatggctgcggctggccattaatataaagctcgaccacgttggtgtgggttcctttgaccacgacacgacagcaattctcgccagcagagagggttaaatcgagatgaataaaatccggagtctcttcgacggcaatatcaacggcgttattggcgatcagcttctgcgccatttcaacgtgccgcggagtgatatcttccagcgtttttaatcccttttgcgggtcgccgccaaatgcgccaattgcggctgccagcggtacaccgcaaacggtggtgccgggtatggtgacgcccatcgcgtttttataaagattggcggaaataaaaccgctaattttggtgcaaggctgatccagatattgtgcggcgtaggcggccgcgaaggaaatagcgacgggttcagtacaacctaaagccggggcgacctcttgtttgagccattttacgtacagggaagcgttatcggtgttcataatgatttaatgtccaaaattaaattttattcagctgcgataatgctaagacaaaagataagaaaaaacttaccctaataaccataaaaagactgtggtttggagaaaaattttatcttacgggaggttttaagatacacctgtgtcaaaaagtaaactttttatatttcagttagttggggtgattcgttctaagcgtaacggatgtttttgttaatctgctcacagcgtttctggaaggacaattttctcttgttcgtacttttcgaatcaatagcccggagatagcgtaaggcgaaggaatcataggtagatctggatcacacttttgcgctatacagatcgacaacgttcatgcatttgaggtgtcactatgccgtcggtatatcgtccgctggttaatttcgttgcgaaggccatgcaggccgtgctgaatctggcactgctgtgcctgggaattattctggtggtgttcctgggaaaggagaccctgcatctggcgcacgtactgtttacgccggagccggtgagtaagtacaagctggtcgaagggctggtggtctattttctctactttgagtttatcgcgctgattgttaaatattttgaatccggttttcactttccactgcgctatttcgtctatatcggtattaccgcaattgtgcggcttattatcgtcgatcatgagtcgccgctggcggtgctcatttactccgcggcgatcctgatcctggtgattacgctctggctgtgtaactccaatcgcctgaaacgcgaataaaaaaaagcggcctccagggccgctgaccaacagtcacaaatagaatttatgtagggtccagttgaggatagcagtggcattgaccttactttttcagctgagggcgacggcgacaatacccggttggggtcgtgtattgcggctagaccgtcggccctcctctgaaatttggggccggtgttacaaaaaaattaacctttcactccacccgccgtcaggccattaaccagccagcgctgcgccagcaggaagacaaccgtgatcggaatggcggagagcaccgccgcggcggcaaagtcgccccacagatagttctgcgggttgagatactgttgcatacctaccgccagggtatagctgttcacatcgcgcagcagcagcgaggcgaccggcacttcggtgatggccgcgatgaacgacagaataaacacgactgccagaatcggcaccgacagcggcagcagcaccagacggaaagcctgccatggggtcgcgccatccagcgccgccgcttcttccagcgagccatcgatggtttcgaagtagcctttaatcgtccagacgtgcagcgcgataccgcccatgtaggcaaagatgacgccgccgtgggtgttgaggccgacgaacgggatgtactggcccaggcggtcaaacaacgcgtacagggcaaccagcgacagcaccgccgggaacatctggaaaatcagcatccctttcagcagggtcgctttccccgggaagcgcatacgggcgaaagcgtaagcgcaggtggtggagagagcgacgataccgatcgcggtgatcccggcgaccttaatcgagttccacagccacagcaggaccgggaacggcggcggcgtgacgcggccatcggcgtgttcgacgctgaagcctaacgccagacgccagtgctcccaggagatggtatccgggatcaggctgccggtggcgaagttgccttcgcgcagcgagatagcgataaccatcagcagcggaaacataatcgcggcgataaaaatcagtagcaggagatgcgtggtaaataaacgtagcttctgcgatttgggttggaccatagccattatcgttatctcccttaatcaaacttcatgcgcgtggctttcagattcacaatcgctaacgcgccaaccagcaggaagataagcgttgcgatagccgccgccaggccgaagtcctgaccgccgccgccttcaaaggcgatgcgataggtgtagctcaccagcaggtcggtataaccggccggggtggtggtgccgagacggtccggaccgccgttggtcaacaattgaatcaggacgaagttgttaaagttaaaggcgaagctggcgatcatcagcggcgttagcggcttaatcagcagcgggaaggtaattttaaagaagttctggaacgggccggcgccatccattgccgacgcttcgtacagatcgtccggaatcgccttcagcagccccatgcacaggatcatcatgtacgggtagcccagccaggtgttgacgatgatgatcatggtgcgcgcggtggtcgggtcgctaaaccaggccggcttaatgccgaacagcgtgctgagcatcatgttgatttcaccaaagctctggttgaacagccctttgaaaatcagaatcgaaataaacgacggtacggcgtacggcagaatcagcaggacgcgataaatcgctttgcctttcagcgcttcccactgcaccaggcaggcgaggatcatccccaccgcgacggtcagcaccacggtcagcaccgagaacaccaccgtccagacgaagatcgcgaagaacggtttctgaatgccttcatcgtggaagacgcgggtaaagttgtcccagccgatagtcacagtgtagcccgggctcagcttctcattgccccagctgccgtcggcgttaattgactggtagaagccgacgtcgttgttcgggcggtatttaacgtgggtctgattgttggtcagtaccccgtcttcgccgagggtatacagaggctgggtaccggagaactggcgcagggagctcatgatgactttgctgtcatccggcagcacagcggtcagctggttcagcgcggtgcgattctgggtaatcacgcgcaggttggcgcgctcgccttccggcagggcgtcggtttcttttaacgccagcttctgctcgccgccaaatttaaaggcgtcagaaaggtagtttttaccgctttcgccgtcggtcagcgccagcttccactcgtcacccgcagggatcagcgtgaaattataggctttgccggcctggaaggaacgatccatcagcacctgctgcgcacgctcaaaggtcagctggttggtgctactgtagttggtaaacgcgatagcgatagtgcagatcagcggaaacaggacaaacaggcccatgccggcgaggccgggataaacatagcgccaggcataagccttgcgattagcgaaaatatacaggccaactgagcttaaaatcagcgtcatgatggcgaacaggtactccccctgggcgtacatcaaaacaacaaggtaacccaccagcaggcacagtaagccaatcacagaccatgtgagttgcgggctttgccaccagtgtctctttttaacggcatccatggggatcatcctctacagcggtgaaaacttatttgtcaggtggcgcttcgcttacctgacctacggtccgagccgtagtggtagggcgggtaggcgcacgcgccacccgccgttttcttacttagtgatacggctctgtgcatctttcagcgcagcatcgacagtctggcgaccgctggcggcgttgataaccgcggtacgaacggcataccagaaggcagacatctgcgggatgttaggcatgatttcgcctttctgggcgttcgccatggtggcagcgatgcgcggatctttttccagtttttcctggaaggatttcagcgccacggcacccagcggtttgtcgttgttaacggcttccagaccctgatcggtcatcaggtagttttcgaggaactctttggccagctctttgttcgggctggcggcgttgatccccgcgctcagcacgccaacgaacggtttcgatggtttgcctttaaaggttggcagcagggtcacgccgtagttaaccttgctcttatcgatgttagaccacgcccacggaccgttgatggtcatcgcggtttcgcctttgttgaaggccgcttccgcgatggagtagtcggtgtcggcattcatgtgcttgttcttgatcaggtcaaccaggaaggtcaggcccgctttcgcgcctgcgctgtccacgccgacgtctttcacatcgtacttgccgttttcaaacttgaacgcgtatccgccgtcggcagcgatcagcggccaggtgaagtacggttcctgcaggttgaacattagcgcgctcttacctttcgctttcagttctttatccagcgccgggatctcttcccaggtcttcggcgggttcggcaccaggtctttgttgtaaatcagggacagggcttcgactgcgatcgggtaggcgatcagtttgccgttatagcgaaccgcatcccaggtgaacggatagagtttgtcctggaacgctttgtccggggtgatttccgccagcaggcccgactgcgcgtagccgccgaaacggtcatgcgcccagaagatgatgtctgggccgtcgccggtcgccgcaacctgcgggaatttctcttccagcttgtccgggtgttctacggaaactttaatgccggtgtctttttcaaactttttacccacttcagcgaggccgttgtagcctttgtcgccgttaatccagataaccagcttaccttcttcaatttttgcgagggcagaggcggaaaacatcatcgtggtcagtgccgacagcgcgaggatgcgagcgccagttttgattttcatatacccgtcctttttggtgttgtactcgtggatacacttcggtggcttaacgatgatgagtttccttttttaacaacccctttccatcctccccaggtctacgccccacccgctggttgtgtgatctccattgcaaaaacggccgtattgcgtcctggagcacagaaaaaagcgcccaattttgtcgcctccatcacgaaatcacgctccgcccgccatcccccgcggcgagagccaatctctcatcctcccatctcctcccccataaaaaagccggggggtggaggatttacctgcgtaatgaatgccgcatagtcgacccatcttgaatgtgactgttagtgacaggttgtaacgaagggagaagggcatggcgagcgtacagctgcgaaatgtaacgaaagcctggggtgacgtggtggtatcgaaagatatcaatctcgatatccacgaaggggaattcgtcgtgtttgtcgggccatcgggctgcggcaaatctaccctgctgcgtatgattgccgggttagaaactattaccagcggggacctgtttatcggtgacacccgcatgaacgagatcccaccggcagaacgcggcgttgggatggtattccagtcttatgcactctatccccacctttccgttgcggaaaatatgtcgtttggcctgaagctggccggcgcgaaaaaagatctgattaaccagcgggtgactcaggttgcggaagtgctgcagctggcccatctgctggagcgtaaaccgaaagccctctccggcggtcagcgccagcgcgtggcgattggtcgtacgctggtggcagagccaagcgttttcctgctggatgagccgctttccaacctcgatgccgccctgcgcgtccagatgcgtatcgaaatctcccgtctgcataagcgactgggccgcaccatgatctatgtcacccacgatcaggtggaagcgatgaccctcgccgacaagatcgtggtcctcgacgccggccgtgtggcgcaggttgggaaaccgctggagctctatcactatccggctgaccgcttcgttgccggcttcattggttcaccgaagatgaacttcctgccggtcaaagtcaccgcgacggctatcgatcaggtgcaggttgaactgccgaaccgtcagcaaatctggctaccggtggacagcgccaacgtgcaggcgggcgccaatatgtccttaggtattcgaccggagcatttattgcccagcgatatcgccgatgtaacccttgaaggcgaggtccaggtcgtcgaacagctcggtcacgaaacgcaaattcatatccagatccccgccatccgtcagaacctggtttaccgccagaacgacgtggtgttggtagaagagggagccacattcgctatcggtttgccgccagaacgttgccatttattccgtgaggatggcaccgcttgtcgtcggctgcataaagagccgggcgtgtaaggcttcccattaaaaaagcgcgaacccggctggcgatataccggcgaagcgtgcaaagaaaagcaatgatctcaggagatagaatgatgattactctgcgcaaacttcctctggcggtcgccgtcgcagcaggcgtgatgtctgctcaggcgctggctgtcgatttccatggctacgcgcgttccggcattggctggaccggcagcggcggcgagcaacagtgcttcaaagcaaccggcgctcaaagtaaataccgtcttggtaacgaatgtgaaacctatgcggaactgaagctgggccaggagctgtggaaggaaggggataagagtttttatttcgatactaacgttgcctattccgtgaatcaggaagatgactgggaaagcacctctccggcgttccgtgaagccaacatcgagggtaaaaacctgatcgactggctgccgggctccacgctgtgggcgggtaaacgcttctatcagcgtcatgacgttcacatgatcgacttctactactgggatatctccggcccgggtgcaggtctggaaaacgttgaccttggcttcggtaagctctctctggccgctacccgtaactcagaaagcggcggctcttatactttctccagcgatgacaccaaaaaatatgctgcgaaaactgccaacgacgtctttgatatccgtctggcgggtctggaaaccaacccgggcggcgtgctggagttaggggtcgattacggccgtgctaacccgcaggatgactatcgcctggaagacggcgcgtcgaaagacggctggatgtggaccggtgaacatactcagtctatctggggcggcttcaacaagtttgtggttcagtacgccactgacgcaatgacctcctggaacagcggccactctcaggggaccagcatcgataacaacggcagcatgatccgcgttctggatcacggcgcgatggacttcaacgatgactggggcctgatgtacgtggcaatgtaccaggacgtggatctggacagcaagaacggttctacctggtacaccgtgggtgtccgtccgatgtacaaatggacgccgatcatgagcacccagctggaaatcggttacgacaacgtgaaatcccagcgtaccagcgaaaacaacaaccagtacaaaattactctggctcaacagtggcaggcaggcaacagcgtctggtctcgtccggctatccgtatcttcgcaacctacgcgaagtgggatgaaaactggggctacagcaacacctccggtctgcagacgaaagacagcagcggaagcggcgctttcacctccagccgcggtgacgacagcgaagttaccttcggtgcccagatggaagtgtggtggtaataccgtccgcaggacgggtgtaacctgggaggggcgtcagcccctcctgattattcagggttagcgcgctattgcctggctaccgctaaaccgatgctatccaaggtgagaagaatgaaaatgaagaaaactctcgtcgctctgtgtttatccgcagggatgttggcatgcgtgccggggatgagccttgccgatgttaactttgtaccgcagaacaccagcgccgcgccggctattccagccagcgcgctgcagcagctgatctggacgcctgccgatcaatcaaagacgcagagcgttgatttaactaccggcggtcaacgcctggatgtcccggggatcgtcggaccggtcgccgcctggagcgtgccggccaatatcggtgagctgaccctgacgctcgacagcgaactgaacaaacataagcagatttttgcgccgaacgtgctgattctcgaccagaacatgacgcccgcggcgttcttccccagcaattactttacctatcagcagccgggcgtgatgaccgctgaccgcctgggcggcgtgatgcgcctgaccccggcgctgggccagcaaaagctctatgtgctggtgtttaccactgaaaaagatctccagcagaccacgaccctgctggatccggcgaaagcctatgccaaaggcgctggcaatgcggccccggatatcccggatccgatcgctaaacataccaccgatggcgtgctgaagctgaaagtgaaaactaatagcacttccagcgtgctggtggggccgctgttcggctcttccggcccgggtccggtaaccgtcggcaacaccgcggcgccggtagccgcgccagccgccgccgcggcgccggccgccaaaagcgagccgatgctcagcgataccgaaacctacttcaacaatggtattaagcaggcggtgaaacaaggtgacatcgacaaagccctgaaattgatgaacgaagctgagcgcctcggctcgaaatccgctcgttccacctttatcagcagtgtaaaaggcaaggggtaatcgtctccccacaatgctgatgtttaggcacagcctttaggtgcatcctccgggatgcacctttttttgcacgcgcggcagcctgttgcatggctgttgcgtgaatgatcgtatattgacgtttgcccgccaccaaccgcctattctgcgatacaatgctttcacgttatgtaccggagaatcaggcatgtcccatcctgcgcttacgcgactgcgtgcgctgcgctattttgccgttatgccatccctgccgccgccgctaagtgactggctgctgctggaggactcaatgacccagcgctttgaacaacaaggaaagcaggtcaccgtgaccctggttaacgaagggtatatcggccgtgacgcgctgactgacgaagcggcgctgctgcccgacgagccgcgctactggctgcgggagattatactcaatgccgatggcgagccctggctggccgggcgcacggtggcgccggagtcgacgctgtgtggtccggagctggcgctacagcagctcgggcaaactccgctgggccgatacctgtttacgtcgtcgacattaacccgcgattttattgaaattggtcgcgatgcagcgctgtgggggcgtcgttcccgcctgcggctgagcggcaaacccctgctgctgaccgagctttttttgcctgcgtcgccgttgtactaagaggaagaaaaaatggagtggagtctgtcgcagaataagctgttggcgtttcatcgcctgatgcgcactgacaaaccgatcggcgctttgctgctgctgtggccgacgctgtgggcgctatgggtggcctcgccgggcgtcccgccgctgtggatcctggcggtattcgtcgccggcgtctggctgatgcgcgccgccggctgcgtggtgaatgactatgccgaccgaaaatttgatggtcacgtaaagcgtaccgcccgccgtccgctgccgagcggcgatgttaccgagaaagaggcgcgaacgctgtttatcgtgctggtgctgctctctttcctgttggtgctcaccctcaacaccatgaccattctgctgtcggtggcggcgctggcgctggcgtgggtctatccgtttatgaagcgctacactcatctgccgcaggtggtgctgggcgcggcctttggctggtcgatcccgatggccttctcggccgtcagcgaatcgctgccgctgagctgctggctgatgttcctcgccaatattctgtgggcggtggcctacgatacccagtatgcgatggtggatcgcgatgacgacgttaagatcggcatcaagtcgacggcgatcctgtttggcgaaaacgatcgtctgattatcggtatcctgcaggtggccgtactggcgctgatgggcgcggtgggttggctgaatgggctgggctgggaatattactggtcgctgttcgtggcggcgggtctgtttggctggcagcagaagcttatcttcaatcgcgaccgcgataactgcttcaaagcgtttatgaacaataactacgtcgggctggtgctgttcctcggcctggcgatgagctacctgtaacctcctgtccgctgccccccggcattccggggggcagcaaacgccgcgttacgcgtcgtcctgcgtgacgctctcaatggtcagtcggacatccgacgtaatcaagtccgccagcatccgataaaccttcagggtctcttccggctcggcgtcgccggtgtcgctgatatagccttcatcgcgcagggtcaacaccagggtgctgaacaccgctttgtcgaagaactccggcgcattgatgccgtgtagcaccgacagacgctgggccacggtgcgactctctttttccagcgagctgcggttgatcgccgggttagcgctcagcagccagaaggtgatggcatagcgctgcagcgtctcgcgggcgccagcggccagcagctgcagggagcgagagtgcgacgggttgaggctcatgacatcgccatcgacgacgatcagctcctgacgcagcatctcggcaatcagcgcatccaccactccggccagctccgctttttcccagcgcaggaacagctcggccttgaggaacggatagagtgtttccacatgacgcagcacttcggcgcggctgagatgacgatgctgagtcaccagagcggctaacagcgacggcatcaccagcatatgggtgatattgttgcgatagtaggtcatcagcaccgcctgctcgcgcggcaggatgatgatgtcgccaatggtgtccttctccacttcgaacttgttcatctgcagtgcatgatcgatgagctcgctggctgaagcggatggggcggtcgcatccggagaatagggcacattgcgcagcagcgcgaggtagcactctaactgctgggtgagctgctcacgggtcagcgaacgctggcgggaggccagtagcgccgtacagcacaggttcatggcgttggccgcgccggcgttattgatgcgcaccatcaggtcagcggcgatgctattcaccgtcggcgtcagccaggaggggcgaaccgcttcgatcgggtcgatcgcttcccgccaatccggcacatgctggttaagataggtcatcagcggcagcggtttgccgaagttaacgtaaccctggcccaggttgcgcagcttgctcaagccacgcaccatctgcggcagactctctttctctttagtggcgccgcgcagctctttggcgtaggttcctacctccatcacgtgctcatagccgatgtaaatcggcaccagggtgatcggtcgggttccgccgcgcagcatcgcctggatggtcatcgacagcgtaccggtcttcggatcgagcaggcggccggtacgggagcggccgccttcgacgaaatactccacggaatagccgcggctgaacagttcgccaaggtattcgcggaacacggtggaatagagtttgttgcccttaaaggtgcggcgaataaagaaggcgccgaggcggcggaagatcggcccggccggccagaagttgaggttgatgcccgccgcgatatgcggagggaccagcccctgatggtacaggacgtaggagagcagcagatagtccatgtggctgcggtggcaggggacatagacaatttcatggccgtcgtgcgccagctggcgtacgcgctcggcgttatgcacgttgataccctggtacaggcggttccaggtgaagccgagaatgcggtcggtcaggcggatcatctcgtatgagaagttcgccgcaatctcttccatcagcgcgatagcgttctgctgtgccttctcgtgcgaaattttcttgctgcgcgcttcgtcttccaccgcgcgggcaatcgctttcgaggccagcagtttattaaacagatcctggcgggccggcagacgcgggccgacggcggccagccgctggcgggcaaaatgcatgcgagcgacgcgagccagcttctgggcgatgatcttatcggtaccgtgctcatccgccatgcggcgcagcgaaacggacggcgagaagcgcacgaagctgtcgcggccgagccaggagacggcgaaaaatttctgaatgccgttcagcatccgcagcggcggattgacttctcctttctcgcgacccggcgaacggccgaacatgaccgaaaccggcaccatttgcacatcgaggtccggatggttgcggtgcagatcgaggtaatcgtggaacagcttgatggactcttcttttggcgtgtaataagtaaatacgcgcggcccaccgtggatgaatacgtaacgcggcagcagggcgccgtcgatttccagcggttcaagcgggtcaggtaaatcatgcgccaggcattgggcgcgcagcgtcagcaggtccgccttcgaattatagggcaggacgtacatgaccggacgcgaggtatcgagtcctaattcctgggcaggctctgccggaatagacttgctttttaccagcacctgtaatggtaaattcagtaatttatagtaaattcgttgccagccggacataaacgatgtgaagcctctggttaatcatgcaaatgcgcggcaagaataacagaaagtgggcaaaatttccgttaccacgcggcaaacgcgcacactcatcgacgtcatttacgtaaaaaggttttgtgatggccaataataccaccgggttaacccggatcattaaggcggcaggttactcctggaaaggatttcgcgcggcgtggatcaacgaggctgcgtttcgtcaggaaggcgtcgccgctatcgtggccgtcgcggtagcctgctggctggacgtcgacgccatcacccgcgtattgctgattggctcggtcctgctagtgatgatagtcgaaattctcaacagcgcgattgaagcggttgtggaccgtatcggctcggattttcacgagctttcagggcgcgccaaagatatggggtcggcggcggttctgctggcgattatcatcgcgctgatcacctggggaacgctgctgtggagtcattatcactaacgttcttcgctaaccctcgcaaaatatgaacaatccgccgatttttgtgtgccatgtggttccaaaatcaccgttagctgtatatactcacagcataactgtatatacacccagggggcggaatgaaagcgttaacgaccaggcagcaagaggtgtttgatctcattagggatcatatcagccagacgggcatgccgccgacgcgtgcggaaattgctcagcgcttggggttccgttccccaaacgcggcggaagaacacctgaaagcgctggcgcgtaaaggcgcgatcgagatcgtctccggcgcttctcgcggtattcgcctgctgacggaagaagagcaaggcctgccgctgatcggtcgcgtcgccgccggtgagccgctgctggcgcagcagcatattgaaggccactatcaggtcgacccgtcgatgtttaagcccaacgccgatttcctgctgcgcgtcagtgggatgtcgatgaaagacatcggtattctggatggcgatttgctggcggtccacaaaacccaggatgtgcgtaacggtcaggtggttgtcgcgcgtatcgatgaagaagtgacggtgaagcgtctgaaaaagcagggcaatgtcgttgaactgttgccggaaaacagcgagttttccccgatcgtcgtcgatctgcgccagcagagttttaccattgagggtctggccgttggcgtgatccgtaatggagaatggctgtagcgcctgcctctgcgcagcgtcatctgttgcgtgacgctgcgacgtttttcctcaatcaggtcctcaaacatgctgctcaacgctgccgataaagcgctgtggcgtcttgccctccctatgattttctccaacatcaccgtcccgctgctggggctggtggatacggcggtgatcggccacctggacagcccggtatacctcggcggcgtagcggtcggggcgacggccaccagtttcctcttcatgctgctgctgttcctgcgcatgagcaccaccgggctcaccgctcaggcctggggcgccaaagatccgcagcgcctggcgcgggcgctggtgcagccgctggccctggcgctgggcgccggggtgctgattatcctgcttcgcctgccgctaattgacctcgctctacatattgtcggcggcagcgaggcggtgcttgagcaggcgagacggtttctcgaaattcgctggctcagcgcccccgcctcgctggccaacctggtgctgctcggctggctgctgggcgtccagtacgcccgggcgccggttattctgctggtggtgggtaatctgttgaatattgtgctcgatctgtggctggtgatgggcctgcgaatgaacgtccagggagcggcgctggccacggtcaccgcggagtacgccaccctcattattggcctgctgatggcgaagcgggtgctgacgctgcgcggcgtgtcgctggcgatgctgaaaaacgcctggcgcggggatctgcgccgtttattggcgttgaatcgggacatcatgctgcgctcgctgctgctgcagctgtgctttggcgcgctgaccgtattcggcgcccgtctgggcagcgacatcgtggcggttaacgccgtactgatgaccatgctgacctttaccgcctacgcgctggatggctttgcctatgccgtggaggctcactccggccaggcctacggcgcgcgcgacggtagccagttgctggaggtgtggcgggcggcctgccggcagtccggcatggtggcgctggcgtttgccctgatttacagcctggcggggcagtacattatcgcgttgttaacctcactgccttccctgcagcagctggccgatcgctatctgatctggcagacgatcctgccggtggtcggcgtctggtgctatctgctggacggcatgtttatcggcgcgacgcgcggcgctgagatgaggaacagtatggcggtcgccgcggcggggtttgccgtgacgctgcttacgctaccggtgcttggcaaccatggtctgtggctggcgctggcggtgttcctcgccctgcgcggcctgtcgctggcgctgatctggcgtcgtcactggcgacgcggcacatggtttagttagtcatctcccgtcattgccgttagccgtgaccttccccggtcgcgctacgcttacagggcgattcaatagcccggctcagcgtggcgcaagccgggaacatcctcttcgcgttatcccgcggtgcgatggttaaaaattccgaataacgaatcgacgccagcattctcatctatagttaataccatgtccggcacaaaacgggctgtaaacccaccgaatgatgaggacgttattatgaataaagacgaaatcggcggtaactggaaacagtttaaaggtaaagccaaggaacagtggggcaaacttaccgatgatgatatgaccgtaatcgaagggaagcgcgaccagctggtcggcaaaattcaggagcgttacggctatgagaaagatcaggctgagaaagaagtctcagactgggagcataagaacgactatcgctggtagcgttccttgatccgaagaatgaagcatttgtgttagtgcctgtctgaatggcgcacggacgcgccgttaaccctttttcccgctgcggcagccgctcagcgggctttctttttgagctgaatagtatgatcgtgctggcagtgtcccggggtgctgcaggcttcgacttccacgcagcccgcgcaaagcccgtgagcttctatcacattgtggcgcagggcaaaccccatgcgggccgccagcgtatgcatgatatcttccaccccttccgccgcttcttcttttaccacgccgcagcggtcgcagataaacatggccgagctatgggtcggctggtcgaacagatggcacagcacatagctattggttgactctaccttatggacaaaaccctgctcgagtaaaaactccagcgcacggtaaaccgtcggcggcttcgcctgcggctctttttcacgtagcaagtccagcagatcgtaggcgctgattgccccttgctgcaggctcatcaggcgcaacacttccagacgctgtggagtcaggcgtacgccgcgctgtgcgcaaagcttttcagcatgcgctaacatctcttgcgaaggggtcttatccatgagcatcctcggattgcgtgaatttgaatctgttactttatcacgttcctcagaaaacaccgagagccggcaggtgatacgggtcatacttcaggttgtcggcaccggcgcccgtcccgagcgctggccgcttattctcgagcagactacgccttagccgctcgctaaaaccaccatgtccgatttaatcacaacacgcccgaccctgggtatgctatatctgaagtgtctcattttcgggagaaaacgatgaaacgacctgattgcattcgccactggcgcgaactggaagggcccgacgatgctacttatcccgacagcccggagcgtttttcaatcggcgcgccgctggggcgaggtttacgtctcaaccggctggggatccaccacgagcggctgccgcccgggcggcgcacctcttatccacacgcggagagcgatgaggaagagttcatctacgtgctggagggctatccggaagtgtggataaacggctatctctggaagctggagcccggcgacagcgtgggttttcccgctggtaccggcatctgccacacctttctcaataacaccgagcaggaagttcgtctgctggtggtgggcgaggccaacaagaagtacaaccgcatttattacccgctcaatcccggctatgccgcgacgcgccaggatcgttgggttgaccatccgccgcagttcttcggtccacacgacggcaagccgcggaaaaagtaatcatttcaggtgaggggcgaagcgcggcgcactatgcgcctgtggtgtatctttatgctatagtagcgcccctttttacccggatgcttatttattcgccatgatgcctgaatcaacgtcacctgttttccctgctcaccgcttctccatcgcgccgatgctcgactggaccgaccgacactgccgctacttcctgcggctgctgtcgcggcatacgctgctgtataccgaaatggtgaccaccggggcgattattcacggcaaaggggactatctggcctatagcgaagaagagcacccggttgctctacagctcggcggcagcgatccccaggccctggcgcagtgcgcgaagctggccgaggcgcgcggctatgatgagatcaacctcaacgtcggctgcccctccgaccgcgtgcagaacgggatgtttggcgcttgcctgatgggcaatgcgccactggtggccgactgcatcaaggcgatgcgcgatgtggtgtcgattccggtcacggtgaaaacccgtatcggcattgacgaccaggatagctatgagtttctgtgcgacttcattgagacggtctccggcaagggcgagtgtgagatgtttattattcacgcccgcaaagcctggctctccggcctgagtccaaaagagaaccgcgagatcccgccgctggattacccccgcgtctggcagctgaagcgcgatttcccccatctgacgatggcgatcaacggcggcatcaaatcgctggacgaagccagagtacagcttgagcatatggatggggtgatggtcgggcgtgaggcctatcagaacccgggcattctggcctcggtcgaccgcgaaattttcggcgtcgccggcgcggatgccgatccggtagcggtggtgcgagccatgtacccctatattgagcgcgagctcagcaagggcacctatctgggccatattacccgccatatgctggggctgtttcaggggatccccggcgctcgccagtggcgtcgctacctgagcgaaaatgcgcataaagccggcgccgatattgcagtgctggagcatgccctgaagctggtggcagataaacgttaatttctgaccaaaacctggtgaaattgaccacgcctcgcgcaccgtcgcggggcgttttgttttaaagtcaaaagcttatggttggcatgctttttgtaatacctgcagagtgaagtattcattctttggggagagaaccatgctggaactgctatttgtcattggattttttgtcatgctgctggtcaccggcgtatcgctgctggggattatcgcggcaatcgtggtggcgacggcgctgatgttcgtcggcgggttgttcgccttgatgatcaaattactgccgtggctgctgctggcggtggcggtggtgtgggttattcgggcgctgaaatccccgaacggaaatgcttttcgcgacaataaccgttggcgttactaaggtattgaggggtgcgtcacaacctgaacaattttgcagacaaccgcgtaggcattgctgcgcaaatctgtcactattagcgcgttaacgaattcatcgcgctgtaccctacatacagccgaacttaaaaaaagtaagggcttcccagctggaagccctaaacttttgccccttctgccaacttatggcagcagcaaactcgaaccctgcgtcacccggctctccagaacttcatgcgcccgccgcgcttcgctcagcggatagatctgactttcagccacgtccactttaatcaccccgctggcgatcagcgaaaacaattcactgcaggcttcctccagttcttcccggttggtgatatagccctgcagcgatgggcgagtgacgtacagggagcctttttgattcaggatccccagattaacgccggtcaccggaccggaggagttaccaaagctgaccatcaggccgcggcgctgcaggcagtccagagaggcctcccaggtatctttccccaccgagtcgtagacgacggccactttcttaccgtcggtgagcgccttgagccgctccacgatagactcctcgcgatagttaatcacctgccaggcgcccgcctctttggcgcgctgcgctttctgcgcgctgccgacggtaccgataagtttcgcccccagcgctttcgcccactgacaggctatcagccccacgccgccagcggccgcgtgaaacaggaacatctcatcaggcttaatttcataggttttgcgcagtagataccagaccgttaatcctttgaggaacgacgcggcggcctgttcgaaagagatagcgtccggcaggaccgccgctttgtcggccagcacattgtgtaccgtgctgtaggcgccgagcgccgactgggcgtacaccacccgatcgcctaccttaatatgcgtgaccccatggccaactttactgacgatgccggccgcctcggtgcccaggccgctcggcagcgacggcggcggatagaggccgctgcgaacataggtgtcgatatagttgatgccgatggctttgttttcgacctgaatctcatgttctgcgggatcgcgtggcgtgaactcaaccgcctgaagcacctccggtcccccgtgtttcgaaaattcgatgcgtgttgccatgttcgctcctgtgttgttccgagattattcagtaagcttaacagcctgcgccggcggcgacggattttcttacccgcctcaggcctgccacgcttaatgggttctttagcggcaatggctttctcgctatactgtcacgctcttttccggatcggtgaaatgttaggctatggcaggaaataaacccttcaacaaaccacagacagaaacccgcgaacgcgatccgcagctcgccgggctgaaagtcccgccgcactcgattgaagcggagcagtcggtgttgggcggtttaatgctggataacgagcgctgggacgacgtcgccgaacgcgtcgttgccgacgacttttatacccgtccgcaccgtcatatttttaccgagatggcgcgcctgcaggagtccggcagcccgattgacctgattacgctcgccgagtcgctggagcgtcaggggcagctggacagcgtgggcggcttcgcctatctggccgaactgtccaaaaacacgcccagcgcggctaacatcagcgcctatgccgacatcgtgcgcgaacgcgcggtggtgcgcgaaatgatttcggtggccaacgagatcgccgaagccggcttcgacccacaggggcgaaccagcgaagatctgctcgacctcgccgaatcccgggttttcaaaatcgccgaaagccgggccaacaaagacgaagggccgaagaacatcgccgatgtcctcgatgccactgtcgcccgtatcgaacagctgttccagcagccccatgacggcgtcaccggggtcaataccggctacgacgacctcaacaaaaagaccgccggcctgcagccgtcggatctgattatcgtcgccgcccgtccatcgatgggtaaaacgaccttcgcgatgaacctcgtggaaaacgcggcgatgctgcaggacaaaccggtattaatcttcagtctcgagatgccctcggaacagatcatgatgcgttctctggcctcgctgtcgcgcgtcgatcagacccgcattcgtaccggtcaactggacgacgaagactgggcgcggatctccggcaccatgggcatcctgctggaaaagcgcaatatctatatcgatgactcctccggcctgacgccgacggaggtgcgctcccgcgcgcggcgtatcgcccgcgagcacggcggcatcggactgattatgatcgactacctgcagctgatgcgcgtgccgtcgctctccgacaaccgtacccttgagattgccgaaatctcccgctcgctgaaggcgctggcgaaagagctgcaggtgccggtggtggcgctgtcgcagcttaaccgctcgctggagcagcgcgccgataagcgcccggtcaactccgacctgcgtgagtccggctctatcgaacaggatgccgacttaatcatgttcatttaccgtgatgaggtctatcacgagaacagcgatcttaaaggcatcgcggaaattatcattggtaaacaacgtaacggtccgatcggcaccgtgcgactgacctttaacggccagtggtcgcgtttcgataattatgccggtcctcagtatgatgatgagtaatccttccgccttcttttattaaggaattcaaatgcaagcggcaactgtagttatcaaccgccgcgctctgcgacacaacctgcaacgtctgcgtgaactggcgcccgccagcaaactggttgcggtagtgaaagcgaacgcctacggacacggtcttctcgagaccgcgcgaacgctgaccgacgccgacgcctttggcgtcgcccggctggaagaggcgctgcgcctgcgagcggggggcatcgcccagccgatcctcctgctggaaggcttttttgctgcggaagacctggcggtgatcgccgcccagcgcctgcatacggcggtgcatagccccgaacagctggcggcgctggagcaagccgatctccccgagccggtgaccgtgtggatgaagctggataccggcatgcatcgcttaggggtgcgcccggaggaagccgaggcgttttatcagcgtctgagccagtgtaaaaacgtccgccagccggtgaacgtggtgagccacttcgcgcgcgccgatgagccgacctgcggcgccaccgaacgccagctggacatcttcaccacctttaccgaaggcaagccgggcttgcgctctatcgccgcctcgggcggcattctgctgtggccgcaatcgcattacgactgggtgcgccccggaattatcctgtatggcgtgtcgccgctggacgatcgctccaccgggaaagatttcggctgccagccggtgatgaccctgacgtccagcctgattgcggtgcgcgagcataaagcaggggagcccgtcgggtacggcggcacctggatcagcgaacgcgatacccgtctcggcgtggtggcgatgggctatggcgacggttatccgcgtgcggcaccgtcgggcacgccggtactggtcaatggccgggaagtgccgattgtcggccgggtggcgatggatatgatctgcgttgacctcggaccgcaggcccaggataaggccggcgacgcggtagtgctgtggggagaggggctcccggtagagcgcatcgccgagataacgaaagtgagtgcttacgaacttattacgcgactgacctcccgcgtcgccatgaaatacctcgactaagcctctggcgtaccggatagtacagaggctgatccggtacgcaccaggcctgcggcgctcaaaaaagcggtttataccgctgcgcggtcactttcccctcaacatcctctcgacctgccgtcatatccggtttattgtgtaagaacctgccccatgtaaacctggagatacatcgcgtgtttcaaaaagttgacgcctacgccggcgaccctattctttctctgatggaacgcttcaaagaagacccgcgaagcgacaaagtcaacctgagtatcgggctgtactacaacgatgacggcattatcccgcagctgcaggcggtggcggaagcggaagcacgcctgaacgccgagccgcatggcgcctcgctgtatctgccaatggaagggttgagcggctaccgtcaggcgattgcgccgctgctgtttggcgcagagcataccgcgcttaagcaaaatcgcattgcctctattcagacggtcggcggttcgggcgcgctgaaggtcggggccgacttcctcaaacgttactttcctgagtctcatgtctgggtcagcgatccgacctgggaaaaccacatcgccatttttgaaggggctggcttcgaagtaagtacttacccctggtttgataaagccaccaacggcgtgcgctttgaggacctgctggcgacgctgcaaacgctgccggcccgcgatattgtgctgctgcacccttgctgccacaacccgaccggcgccgacctgacgccagcccagtgggaccgcgtggttgaggtattgaaagcgcgtcagctgatccccttcctcgacatcgcctaccagggctttggcggggggctggaagaggatgcctacgccattcgcgccatcgccagcgccgggatgccgatgctggtcagcaactcgttctccaaaattttctcgctgtacggggagcgcgtcggcggtctgtccgtggtctgtgaagacagcgaaaccgcgggccgcgtgctgggtcagctgaaggccaccgtgcgccgcaactactccagcccgccaagctttggcgcgcaggtggtggcgacggtgctgaacgatgcagctctgaaagccacctggcaggcggaagtggacgccatgcgcgcgcacatcctgaccatgcgccaggcgctggtcgacgcgctgcagcaggttgccccgggtagcaaagtggattacctgctcaagcagcgcgggatgttcagctataccggatttagcgcggcgcaggtggatcgtctgcgcgacgagtttggcgtctacctgattgccagcggacgcatgtgcgtggcggggttaaactcacgtaatgttcagcaggtagcgaaagcttttgccgcggtaatgtaagccgctctccagcaggttgtctctgccggtcaacgggcaggggcaaccccctcggatgtgatcatcctctttttctatgacatctgcgcgaaaaaggcttttcatccatgccgccggcgggtaaggtcgggacgttgataagcatgcacattattgaaaacaataatgattgatagatttagggataaatatgcgcaaacttactctcgcccttgcggcggcttctctcctgttcacgctgaacagcgccgttgtggcgcgcgcctccacgccgcagccgctgtgggttggcaccaacgtggcccagctggccgagcaggcgccgatccactgggtttcggtggcgcaaattgagaacagcctgctggggcggccgccgatggccgtcggttttgatatcgatgacaccgtcctcttctccagtccgggtttctggcgcgggcaaaaaaccttctctcccggcagcgaggattacctgaaaaacccacagttctgggaaaaaatgaacaatggctgggatgaattcagcatgccgaaagaggtggcgcgccagctgattgcgatgcatgtgaagcgcggggacagcatctggttcgtcaccggccgcagccagaccaaaaccgaaaccgtttctaaaaccctgcaggatgattttctcatcccggccgccaatatgaatccggtgattttcgctggcgataagcctggccaaaacaccaagacccagtggctgcaggcgaagcagataaaggttttctacggcgattcggataatgatatcaccgccgcccgcgaagcgggcgcccgtggcatccgcgtgctgcgggccgccaactcctcctataagccgttgccgatggctggcgcgctgggcgaggaagtaatcgtcaattccgaatattgatgaccgcctgaacgcgataaacggcagcgacggcgctgccgtttttttatgcaaaatcaggggtggaaggttttaccttttcacgtattgctgcacacttagaaggattcattcgcaaaaggagtcaatgatgtggtatcagcaaaccctgacgcttgggccaaaatcccgcggttttcatctggtcaccgacgaaatccttggccagatccgcgggctgtccggggtgaaggttggcctgctgcacctcctgctccagcatacttccgcttccctgacgctcaacgaaaactgcgatcccaccgtccgctatgacatggagcagtattttctcaacgccgtaccggacaatgcgccgtatgaacatgactatgaaggccctgacgatatgccgtcgcacatcaaatcatcgatgcttggcgtgtcgctaatgctgccggtcgaggacgggcgcgtcaggctgggaacctggcagggcatctggctgggggagcatcggatacacggcggttcgcggcgcatcgttgcgacgctcatgggggaataaaagatgacaatttcggagttattacagtactgcatggcgaaaccgggagcagagcagagcgtccacagcgactggaaagccacgcagattaaggtctcagatgtgctgtttgccatggtgaaggaggttgaggaccagcggccggcggtcgcgctgaaggcgagtccggagctggctgagctgctgcgtcagcagcatcgcgatgtccggcccagccagcatctcaataaagcgcactggagcaccgtctatctggatggctcgctgccggattcgcaaatctactacctggtcgatgcgtcttatcagcaggcggtgaaaatgctgccggagccggtccggcagcagcttacccgctaattatttcagcatgggcttgaggaagcgcgcggtgtgcgaggcttcgcactcggcgacggtttccggcgtaccggagaccaggatttcgccgccgccgctgccgccttccgggccgagatcgacaatccagtcggcagttttaatcacatcgaggttgtgttcaatcaccacgatggtattgccctgatcgcgcagctggtgcaggacttccagcaactgctggatatcggcgaagtgcagaccggtggtcggctcatcgaggatatacagcgtctggccggtaccgcgcttggacaactcgcgcgccagcttcacgcgctgcgcctcgccgccggacagggtcgtcgccgactggccaaggcggatataggtcaggccgacgtccatcagggtttgcagcttacgcgccagcgccggtacggcatcaaagaattcacgcgcctcttcaatggtcatatccagcacttcgtggatggtcttacccttgtacttaatctccagcgtttcgcggttatagcgtttgcctttgcactggtcgcacggcacgtagatatccggcaggaagtgcatttcgaccttgatcactccatcgccctggcaggcttcgcagcgcccaccgcgaacgttaaagctaaagcgccccggcgtatagccgcgtgagcgagactccggtacgccggcgaacagctcgcgcaccggggtaaacaccccggtataggttgccgggttggagcgcggcgtccggccgatcgggctctggtcgatatcgatcactttatcgaaatgttccagcccctggatatcgcgatacggcgctggttcggcgatggtcgcgccgttgagctggcgctgggcaatcgggaacagggtatcgttgatcagcgtggatttacccgagccggagacgccggtgatgcaggtaaacaggcccactggcagggtgagcgttacatccttcaggttgttgccgcgcgcgccggtcagcttgaggactttctccgggttggcgggcacgcgctgcttcggcacttcaattttgcgtttaccgctcatgaactggccggtcagggattccgggaccgccataatggcctccaacggcccttccgctactacctggccgccgtgaacgccagcgccgggaccgatatcgatcacatggtcggcggcgcgaatggcgtcttcgtcgtgctcaacgacgatcaccgtgttgcctaaattacgcaggtggatcagggtgccgagcaggcgttcgttatcgcgctggtgcaggccgatagagggttcatccagcacgtacatcacgccaaccagcccggcgccaatctggcttgccagacggatacgctgggcttcgccgccggagagcgtttccgccgagcgggagagcgtcaggtagttgaggccgacgttgacgaggaatttcagacgatcgccaatctctttcagcactttttcggcgattttcgcccgctgtccggagagcttcagattgttgaagaaatccatcgcatggccgatgctcatatcggaaatggtcggcagcggggtgttttccacaaacacgtggcgcgcctcgcgacgcagacgcgtgccgtcgcagctggcgcacggacggttgctgatgaacttcgccagctcttcgcgcaccgcgctggattccgtctctttgtaacggcgctccatgttatgcagcacgccttcgaacggatggcggcgcaccgaggtatccccgcggtcattcatgtatttgaattcaatactttctttacctgaaccgtacagcaccactttctgcacgttggcgctgagggtgccccatggcgcttcgacgtcgaatttatagtgctccgccagcgacttcaacatctggaagtagtagaagttacgccgatcccagccgcggatggcgccgcccgccagcgacagctcgggattttgcaccacgcgatcgggatcgaaatattgctgcacgccgaggccgtcgcaggtcgggcaggcgcccgccgggttgttaaaggagaacagacgcggctccagctcgcgcatgctgtagccgcagatcgggcaggcgaagttggcggaaaacagcagttcttccgctttctcatcatccatattagccacaatggcggtcccgccggagagctccagcgcggtttcaaacgactcggccaggcgctgcgccagatcgtcgcgcaccttgaagcggtcgatgactacctcaatggtgtgcttcttctgcagctccagcttcggcggatccgacagatcgcagacctcaccgtcgatccgcgcgcggatgtagccctgactggcgaggttttccagggttttagtgtgctcgcctttgcgctctttaataatgggcgccagcagcatcaggcgcaggccttccggctgggcgaggacattatcgaccatctgactgacggtttgcgccgccagcggcacgtcgtgatccggacagcgcggttcgccgacgcgggcgtacagcagacgcagatagtcgtgaatttcggtaatagtacccaccgtcgagcgggggttgtgagaggttgatttctgttcgatggaaatcgccggcgacagcccttcgatatggtcgacgtccggcttctccatcagcgacaggaactgtcgcgcataggcggagagcgattcgacgtagcgacgctggccttcggcatacagggtgtcgaaagcgagtgaagatttgccagacccggaaagcccggtgacgacaatgagtttgtcgcgcgggataacgaggttgatgtttttgagattatgggtgcgggcgccccgaacttcgatcttatccattcacctttcccggtaggtagatacacggattgcctggtttgcttgaaggacaaacggcagaaacggctaattatgacacaatttaacctgaatgaatatacagtatcggaatgcaaattcgggtcgagtgtgcaacaatgtcgtagccgggtactatctctggaatcagcctcgcagctattaaaatgctacgtggaaatggtacactcgcgcgtttacactattaagaaacgtattcaggagacacgaacatggccagcagaggcgtaaacaaggtgattctcgtcggtaatctggggcaggacccggaagtacgctacatgccaagtggcggcgctgtcgccaacttcacgctggcaacttccgaatcctggcgtgacaagcagaccggcgaaatgaaagagcagaccgagtggcaccgcgttgtgctgttcggcaaactggcggaagtcgctggtgagtatctgcgtaaaggctcacaggtgtacattgaaggccagctgcgtacccgcaagtggaccgatcaatccggtcaggacaaatacaccaccgaagtggtggtgaacgtgggcggcaccatgcagatgctgggcggccgtcagggcggcggcgcaccggcaggcggcggccagcagcagggcggttggggtcagccgcagcagccgcagggcggcaaccagttcagcggcggcgcgcagtcccgtccgcagcagcaggccccggcagcgccttccaacgaaccgccgatggacttcgacgacgacatcccgttctaaggcttgccttaggcgcactgtctgcgcagtcgaaagcagaaagccccggtttcgccggggctttttctttgttattcctgcaccgtcatttcaggatggaatttgacctacggtaacgagcgattcagatgacgggcacctgagcggtggcggctgtcgccacgctgggctgcggtttggctggctgcgctaccggctcctgccgcggtacggccgtcgctttctgtttgcgggccatgtcatcgacgatcagccgataggcgatgtaatacttatagatattgctgacgtaggttaccgtctcggcgccaattttttctgccgccatattttcgacgttaccgaaccagacgttcgggtcaaatcctcgctgtttagtcatggtgcgcaggcgggcgatacgcgccggacccgcgttataggaggcaaaggtaaacagcgctttatcgagccgggtcatgggctcatcggcatagtaccgatccatcatccagcgcatgtatttcacgccggcatggatattgggatccagctgtttaatatcgcccaccttcagctcttttccagtgctgggcatcacctgcataacgccgatggcgccgacgtggctccgtaccgactgattcagccgcgactcctggtatccctgggccgccatcagcagccagtcgacgtcgtaacgatcgccgtacttgcggaagacatctaccatcgcgaggaatttgcgtcgttccttactcgccgcggcatttttgacatatttagcatttttcaggtaacgcagcaggagagtattgcccagcgtggtgccctgacgattctttttgacgaagttgttcagtaccgtcagcagctgcgggctgtctttgcgtaccgcccaggcaatgtcgccgccgtcgcgcagcaccacattgtcatggacctgaatttttggaaacacctgtttccagaacaacgctttatgctgatcgacgacgatcagcggaatcagcccggcgttgagcatttccagcagatcttcatcctccagcgcttccggcgccgcctccagtatcaccggtgggcgcgactcaccggcaaatcgggcgttcagcgcttgcaggctgtcgtaatagctggaggagcggcgaacaaagacggtttgaccagagagttgctccaggctgtcgaccttcggtgaagccgggccggagatcagtaattctttcacgttgctgtagagcggctgggcgaaatcgacctgtgcttcccgcgagggcgtgatagtcagattggcagccgcaatatcgcctttaccttcattaagcgcgataaagagattgtcccgactgaccggcacaaaaacgatatgcagcttcaggtggcgctgtttgagctttttatccttcgctagctgtttattcagctcgttttccagcgcgataaaaatgtcgtgcgtcgccccgcgctgggtgcctttatcaataaaaaagaaggtcttgctgtaggtggttaatacccgaatggtacgacggtcgatcatgccaggcaaatcgcctctccatggccgtagcatatcgtcgatatgaatcgatagcgtgttgtcttcggctgctgccggcggcgctttttccgcctctactgccggcagcagaggagcgaataacagtgtcgcgaggcaggtgagccaggcgataaacagacgtgatagcgagtaggcgttcatggaggaatactccgcaggggatgtgattattttagcagaacggccgccgttagctgggaacgacaagggcgtaaaaaacataacaatgccgacaaatagttttctcccattttatcgcttactattaatgtgtttttatctttaatttaactatggagataatatggcgaaaatgtgtgtttttaatgataaatagaaaataatgatgatgtttttattttatttctccccatctgttttgttgtaactttttgattgttggtgtttattttatttttctccgatattgattattatcatcttgataatgaatctcatttttattaccgtaacacggcacattactctaatgacacgctgtctggattacgctatcaaagaatagcgcgcagcgctttttctctaatgatgaaacagggcacttaattttattatgcctcacgcttttttttattcccattaatgccgggaaggcgctgacctgcgccaaaatctggcgacgcgctgaggcaagtattttatcccattgttttttcaattggggaaggcgttatgcccgacagcaacagaaaacagggcatattctatgaaatacacgtctcacttcccgctggggatcgtcattcctctgctcgcctgtagcgtgccgctgcaggcggcagagaacatgaccgaacaatcgacgcctgacgagagcgccgccactgccgaaaatcacgaggagacgatggtcataaccgccgccaggcagaacctgcaggcgccgggcgtgtcgaccatcaccgcagaagagatccgcaaacatcccccgcccgcgatgtgtcggagttaattcgtacgcagcccggggtaaacctgaccggcaactctaccagcgggcagcgcggcaacaaccggcaaattgatatccgtggcatggggcctgagaataccctggtgctggtcgatggtaaaccggtgaccagccgtaactcggtgcggtatggctggcgcggcgatcgtgactcccgcggcgataccagttgggtgccagcggagatgatcgatcatatcgatgtgatccgcggcccggcggcggcgcgctatggtaatggcgcgatgggcggggtcgtcaacatcgtgaccaaaccgaccacaccagaatggcacgggtcgtggaatacctatatgaatgctccgcagcaccgtaaagaaggggcgacgaaacgtactaactttagcctcaatggtccgctgtcggacagtgtcagcttcaatctctggggtaatctgagtaaaacccaggccgatgcacaggatattaacgccgggcatgaagcggaacgtaccggttcctacgccggttcttatcccgccggacgtgaaggggtggtgaacaaagatattcacagtaagctgcgctgggagtttgccccgatgcaggccctggagtttgaggccggttacagccgccagggtaatctctatgccggcgacactcaaaacaccaataccagtacgctggtgaagagtatgtacgggaaagagaccaaccgtctctaccggcaaacttacggcgtaacatggaccggcggctgggataatggcgtgaccagcaacagctatgcccagtacgaacacacccgtaactcgcgaatggatgaagggctggcgggcggtacggaagggatcttctccagtagcgagttttcagatatcgatctggccgatgtcctgctacatagtgaagtgaatattccgtttacgctgggggtcgatcagaatctgacgctggggacagaatggaatcagcagcggatgaaagatggcgtatcgacaacccaggcgctctcttacggcactatcgatggcgtatcggctaccggtcgtagcccgtactccagcgccgagatcttctcgctgtttaccgaagataatatggcgctaacggacagcaccatgctgacacccgctctgcgcttcgatcatcacagcatcgtcggcaataactggagtccctcactgaacctgtcccaagagctgacagacgactggacgctgaagctgggcattgcccgtgcttacaaggcgcctaacctctaccagttgaacccgaactatattctctacagcaacggtcaaggctgttatgccagtagttccgcctgctatctgatggggaatagcgatctgaaagcggagaccagcgttaataaagagattggtcttgagtacaagcatgatggctatcaggcggggatcacctggttccgtaacgactatcacaataagattgagtcagggtatgcggcggtgggtaccgccagcaacggcaccaccaatatctatcagtgggaaaacgtaccaaaggcgttagtggaaggcctggaaggaacgctgaatctgccggtgggggaggcggttaactggagcaataacctgacctggatgctgcagagcaagaataagacgacaggcgaccggctgtcagtgatcccgcagtttaccttgaactcgaccctaagctggcaggttcgtgaagatctctccctgcagagcacctttacctggtatggccgacagaaaccaaaacgcttcaattataagagcgaggcggtcagcggcagcgaactaaacgaagtcagcccatacagcattgtcggcctcagtgcgacctgggatgtgaacaaaaatctgagcttcaccagcgggatagataacctgtttgatattcgccactaccgggcagggaatgcgcaaacgaccggcaacgcgacgacgggagcttatctgtatggcgcgggtgccgagacctataacgaatcggggcggaccttctttatgagcgttaatactcatttctgatgatcctgatgaggagtaaaccgggtgcaatgcgacccggtttttttatttcagatgagagcggaggaggcggttataaatcgtgacaaaatcttcacgccctctacattattagctcaacatatccttttatactgatttccgtcgcgcaaggtcgttgatcccgaccgggttcgataatagcatcctgctatttcccttctgtaatatcccctgtcccccttccattcccaaccgcagcgatgcggaggagggggacctccttatttttgccgcgtgatctgatagcgatactgagtgggcgtgagcgcatgatattttttgaaggtacgattaaacgcactgagatcgtcataaccgaccatcatacaaatatcgacgattcggtaaccaggcgttgtcagtaataaacggcaacacagcgacatgcgctgctggcggatatattccattggcgaacgatcaaaataatgacggaagagccgaaacaaatgccagggggaataaccagagatatcgctcagatcgtcgacggtcagtttcttatccagattattatcgatccacaagagcaggtcgcttaataccgattgctggagcgttttgctacgcataattgcggccaatcccataacgcagggctccccaatgaggagccctggggtttattgaacagtgagtgtgccgtggcgaacctgataatttttttgattatcagggccaatatagtcgctggcgggttttgccagctgcagatgaccaaaggcggttgtttgctctgcatgataattttcgccgtcattcacgtcgccgcgcccgttataacgggcaatggccgggaagggatacaccggacgagtcgcgataacagctggagcggcgtcagcgtaaggctgactgactttctgcacgccgtgaaactgcgtttgcgcatctggtttttctgtcatcggcggcaggtcggcagcggctgttgcccgtttgccggccatgatctcctgcggggcgatgccttcctcggtccagcgcatcagcggggtaaggagatcaatttgatcgtaaccttcgccattaccgcaatgggctaccccaggcagcaggaataaccgcaggaaggtatccgttgcggcatggcccatttctgcttctacgccgcgataataggcgatagaaaaggccgggctgacggagtcatcggccagaccgtgccagaggataagcttgccgccgcgctgttgataggcatgaagattggtatttgccgcgttatagagcggcgccagttgggcgacggcgtcaaaattctgctggttaagcgggaaatcccgcatcgattggatcttctgtttttctcctggcaggagcacggattgcagagccggtagtaccatcatttccgacattgagtggccggtcggcgtctcgggcaccggccagcgtagctcggaacccagcggcagaccgcccgcgacgaactgggcgccgtggctgtcgtaagcgccgcggtagagctttttcaccacctcgatctcttcctgcgtcaggcaggtagaacggtcccgagcatcggcaggacagcgggggagccatgactcagagaactgacaggcatacggattttgcaggataccatcctgcacgccggaaagcgtcgggcagtgagccagcacggcctggtgaatcagaggaaggcgatttttcagcaggatagcggtaccgtccgggcgctgattggcggccacattccagccgtggaagaaggagttctgaaactggaaaaaggccgctggcgcgccagcgctgataccgtcaaaatcctgcggaaagcgctgcgcttccatcaatgcttcgcgaccgccgtctgagcagcccataaagtaggcatactttggcggctggcggtaaagcgtctgcatcaccgctttggccagcacggcggtcaggtggttggcgcgccaggcaaaatcgatgcgcttttgcggatcttcggcccatgacgcatccatcatactgccatggtgccccatatcggttgctgccaccacaaactcgccgttcattgccggcaggcagccgctggcattcgacagactcaggttaatactcccgcacagtccgccacagccgacctgcaaaaaacgttgactccagcgttgagtcggcagggcaatctgcacgccaatctcaggggcgatagtggcgctcaccttgcaccagcttccctgcgcggaggtctgcatttcagtgtgattgatagtgacctttgcgccaacggccgcgctgaagtcggtagcgcttagcgcatcgcatgtcagcgcgggaagaacgatcggcagactggcgacagcctgcgtgggtgaagcgaacgataacccgaagagggcgcagaggatgatgggcaagattgtcttgagtaagcgtgtcatacgcagttccctgtggctgatgatgggaggcggcaggatggcgaaacctatgcctcaccttccctggcgaggcgccactgcttggctattgtagataacgatagactttccttgatgccttgataaggcgaccctactgtattctgctattttgaggaaaatatggagatgtttgccaacggcgtctggcggtgaattcggggtagaatgttgtgatatcaattgcataatttattcaatttctcttcattaaatctgctgggttgcaggttatttttctccctgttcctggtgatcccagagagcatcattcctaacgagatccttccccctttccattaataagaaagggggctttttattaataaaacgttcaggaaaatctaaatatagtactggtgttggccattagaacaatgcgcttcagaaaaagttccatcattaaatatatttttaaagatgctttaatatccattttttctccattttgtcgccataattgcatgtaattctgcgcctcgctcaggttattttctgtcgcatattttagagatgcatcctgaacaaataagctcaacgccagcagaacactgctattgctcattatctcgtagacgacacattcatgttaaaaaagactcatatcatcagcggattattgatcgcccctttaacgttatatgccgcaacatcatatcaagttgatgatatccgttttgaagggctacagcgcgtgaccgtcggggcggcgctattaagtatgccattgcacgcgggagatgcggtgacgccagaagatgtcagcgaggcagtgcgcgcgctgtatgcgagcggcaatttcgaaaatgtgcagatcctgcgcgatgggaaaacgctggtggtgcaggttaaggaacggcccactattgccagcgtcagtttttccgggaataaggtagtgaaggatgatgcgctaaaggaaaatctcaccgcgtccggtatttctgcaggtagtgcactggatcgaaattcgcttagcgaaatagaaaaggggttgcaggatttctattacagcgcggggaaatacagtgcgcaggttcacgcggtggtgaccccgttaccgcgtaatcgcgttgacttaacgttcgtttttcaggaaggcatctcggcgaaaatcgcacaaataaacattatcggtaatcaggcgtttcgggaagagacgctcctggaccagcttcagctacgtgataatgtgccgtggtggaacgtggtagccgataaaaaataccagaagcagaagctggaagccgatctggaaacgctgcgcagtttttatctcgatcgcggctatgcgcgctttgctatcgagtccacgcaggtcagtatgaccccagataaaaaatccctgtatatcactatcgccctcaatgaaggcgaacgttatcgggtcgaccgaactcaggtgacaggcgatctggctcagcatgggccggagatcgaggcgcttgcccagccgctggcgggggcatggtatagcggggcgcaagtcaccacggttgaaaatgagatcaaaaagcactttggtaagtatggttatgcctggccgcaggtgacgtccacgccggaaatcgatgatgcgcatcaccgcgtggtgctgcatattcaggtcaacgcgggccgccgctactcggtacgccagatccgcttttccggtaacgacacctcccgggacgcggtgctgcgtcgtgaaatgcgccaaatggaaggggcgtggctcaacaacgaaaaagtcgatcaagggaaggtacgtcttgatcgaacgggtttttttgagaacgttgaacagcagatcgttccggtcaatggaacggcggatcaggtcgatgtggtctacaaggtgaaggagcgcaacaccggctcattcaatgtgggcctgggatttggtacggacagcggcgtgagctatcagcttggcgtgacgcaggataactggctgggaacgggtaatagcgttagcttcaacgggacgcgcaacagctaccagtcttatcttgaactgggggcgacgaacccgtggtttaccgtagatggcatcagcctgggcggaaagattttttataacagctatgatgcttctgatgcggatgccgggagctataaccagcagagctatggtttaggtagtacgctagggtttcccattagcgaaaataactccctgaacctgggactggattatgtccataatcgcctgaccaatatggatccggagctgacgacctggcgctacctcagctctcggggaatcgagcccagcgtggtgacgaaagatggcgacagcggcgcaaaatatagcgccaacgattattttgtgagtcttggatggggctacaacgatctcgatcgcggcttcttcccgcgtgcgggaaacaagagcagcctgagcggtaaagtgacgctccccggttcggataatagctactacaaactctcttttgacaccgcccagtatctgccgctgagcgagaacaagcgctgggtctggatggaacgcctgcgcgcaggctatgccggcgggttagacggcaaaagtgtgccgttctacgataacttttacgcaggcggttcgtcgtcagtgcgcggattttcttctaacaccattgggcctaaagcggcctattaccgctgtaacggtagcgaaagcagctatagcgcctgcccgctggacgcctcgtctgatgcggtcggcgggaatgccatggcggtgctgaacagcgaatttatcattccaaccccctttgtgaatgataagtacgccgatagtctgcgaacctcgctgtttgttgacgcggggacggtctggagtacatcctggcacaacaccgcgcagacgctggcggcagggatccctgactacggcgatccgagtcatattcgtctctccgcggggattgccgtgcagtggatgtctcccctcggtccactggtcttctcctgggcagagccgtttaaaaagtacgatggtgataaagccgaacagtttcagtttaatatcggcaaaacctggtagggctccaacggggcctgatagaccggcgtggctatattctgtggactgtcctccgacatagcgattgagcagaatatactcaaccgctatgtcgatattatcgctaaggaatgcgatctggcgggacacccgcgacatttacccgagcgcggtctgagggcctcgcggacctggtggcgtacgacgaggtaaccgcgcaaaaaatagctgcctgctactatcctctcttcttgccaaaccgcgggtaatactcagtgctgcatcatctaataccaatgactgaggcctcatccagagggactaagacgtattgtaaattaagtttatattatcttattttttattatattttcttttttaagggtaatttggctgtttttcatcaggcctaaccataaatttagagagggaaatgaaacgttactaataatggagtatgtcgttaggaattgtcttaaatcacataattgccaggggcgcttgcgatttataacaatgaatgctatcactatatattgtaataatttgtagcatctttataaggaaggaatatgaaatggactattcttaataccctgatctgcccgcaatctggtatcgccttctcggctatatccagtctgcgtttcttgaaatttatcatgtggtacgaggctgatgtaatcctgttgcccggtgagtcgataagactctattcctcgagagttttaattaatgaccagtatcattcattaaaaatctataatattacggtgtacgacgaggcgcagtgggaaaaattacgtgagcgaccatcgtgcccttaccatgccggtggcgagcggtctgactcctgtttttaccagtccttttgcacgattaagcgttgcccgaataatattccccgcagtgaaccctggcgttagccagtccacgccgccggtcagacaccggcggcgtgacgtcatttcgccagcagggcggccagtcgaggctggacgcttgcgcagccggccagcacgaggttgcctcgccgcaggcccgcattggcgagaaacgcattgcacgttccgcccgcctcctcaatcaatagcatgcctgccagtgcatcccagctgttcatatgcgcttcataataggcgtggagctgaccggcggcgacatgcgccagcatcagggcgcccgcgccaaaacggcgatactccagaccggcgtcgagcagcgtgtcgatagcccgggcgtagtcgctggccggggcccggctggagcgccccatgccgatcaccaccgcatcgggctccggctcgcgtagcgtcaggcgccgaccgttgagatacgcgccttcgccgcgggcggcgaagaaaaattcatcgcgatcgggggcgtaaatgatgccgagcgacagctcgccctggcacactcgcgccagtgagatgcaccagtaatccatgccgaggataaagttggtggtgccatcgacaggatccagcacccagacggtctggtcgttgccttcaaaaccgctctcctcgccgaggaaaccctcctcgggaaagtgggcctgcagccagcctttaatctcttgttctaccgcgagatccgcctgcgacacaaagtcctggcgcgcttttttatcgacctgtaatcccgcatcgcgcagcgcctgggcgtgggcgcctgcctggcgaatcaaggcgcataatgactctcgttgtgcttccgtcatagtcctgctctcagataacaaagggcgacgtgcgccggtgaattaaggttacctccacccaggtggtgcgtgaaggttgcgaagggtcggcggcgcgctccagaagccgggcgagcgcctggcgggcgatcgccgccacatcctgatgtagcgtggtgagctgatagctatattgcgcggtcgtcggcgtgttatcaaaaccaatcagctgaaaatccgccggagcctctctgccgcgctggcgcattccatcgagaaagccacaggcaagctgggcgttggcgcagaagatcccctccagcgcctcgtcggcgagcgccgcagcctgtaacccgcccgcgtaaccttcttgctgacaggcgaggatcgccaggtggcgttcgacgtccactccgcgcgtttgcagcgcccggccgaacgcttccccgcgcatgcggccggcccaggtggaaggatggtggttgagccagccaaagcgctgacagccgctgcgcagcagctggtcggcggccagttcggcgccggcggcgttgtcagaacaaacgtaatccacaccggggatcgtcggctgacgattaatgcccacgaccggaatatgctgctggacgcactcgttcaccagcgcctccggcggctggccggaggtgacgataacgccggagacgcgaaactgagcgaaacggcgcaaggtctgcgccagatcctgctcgctgtggatctcgctcaccagcgcctgaaagccctggcgctggatctcgttaagcagcgcatcaagcagggtactgcgaaaaggatcgctgatgcgcgagacgatcacgccgattaagtggctgcgctgacggttcagcccctgggcgaggaagttaacctgataccccagctcttcggcggcgcgcagtacccgcgcccgggcgtcgggagagatgctgccgttgttgctcaacgcccgggacaccactgcccgggagacgcccgctcgccgggcaacatcctgggcggtgacgctgggtttgcgtgggttcataggaggtacgtctcgtcagtgggcgtgggacgcggcagcgttaaggtgagtccatcccgggaaacgaataagcccggccacggctgacaggcctgctttagcgccgacagagaagcatcctcgcagtgatagagccccatcgccgggagctgcagcgttctgaacagcatcaggcaggaggggaaatcgccatgcgaggcgtcatcgtccagggctgctaccgaggcgcactcctgaaacgccagcccggcgccggccatcagggctatcgagtcggcggtcggtcggccatcgccgctgtaaaacagcgtctgcccggcaatggtgatgcggatggcgcgattactcagctcatgctgggtgggggcagtgcggatctgccagtcctgccacgtccaggcttcgcggcattcctgccagtcgatggtgaaaccaaggtccgcctgcggccagttcgccagcgcggccagctgcatgagcaccggctgctgcgccggctggcagtagataatgactggcttctgacgggaataacttttccagtggttcagtagcgccgtcaggccggtgcagtggtccgggtgaacgtgggtgaagtagatcgcgtcgatatcgttgacctcgccgccgcgctgccagagcgcgcggggaacggtggggccgcagtcgattaaccactgtttgttgtccgcatcgatcacccgcagcgcggaggtattttgcgtgcaggaaaaggcgctcccgcagccaagcacatctattttcatttaccctcgccaaaattttttgccgcttaattaaattgtcataaatacccgacaaagtaggctcacatcatgtcgagtcaacgttgcattttttttacagccaaatgaacacgtgttcaccttgctaaaaaaaatgccgcagcagcgctttcaggtagcgaatatgagttatttacagatctccggccttaaaattagttatggcgataaggtggttttacataatatcgatctggcggtagagcagggagagatgattgctctactgggcccgtcgggatgcggaaaaaccacgctgctgaacgccctctgcggctttattccggtgcaaagcggcgaggtggctattgccagccgaacgatcactcatcttgcgccggagcagcgcaatatcaccatggtatttcaaagctacgccctgtggccgcacctgacggtagcgcgcaatatcggctatggcctgaagctgcgcaaatggcgcggggcggatatcgcgcggcgggtggcggagctgctgcgaatagtcaatctcgaagggcttggcgaggtgaaagtgaccgaactgtcgggcggccagcggcagcgggtggcgctggcgagagccctggccatagagccccaggtgctggtgttggatgagccgttatctaatctggatgccaaagtgcgcctgaatgtgcgccatgaaattaaatctctgcaaaagagactggggttcacgtcattaattgtcacccacgatcagcaggaagccttagtgatggcggaccgcattgcggtattaaatcaggggcgtattgaacaaaccggcacgccggaagaaatatatcaacgccccgcgacgcccttcgtcgctgattttatgggggccgataataaaataatttccggtgaattatccgctgccgcaatatccggtttatctgccgctcagcagggtgacaacgttatttattttcgcagcgccgatgccgcgctcgctgaattaacgcagcctgcgccgcaggagggactggctctggaaggcgtggtggagcaaagcgcgtttctgggcaatctgtatcgtcacagcgtgcgctgccatgaccgcctgctgctggcggatgccgcgcagtgctggccgacaaaaagccgcgttcggctccatgtgccaacgccggccctgcatatttttcctttaccactatcacagtgatatcagcgtgttcattctggggacaatccatgttgactaagacgaaagcagcgatcgtaacgaccctcttcctgagccttggcgcacaggccgacaccattctcaacgtcgccaccgcgggcgatcagaatatggtggattatgtaaaaacctggctggggccaaaatttgaagccgctcatcccggcgtcaaggtgcgggtgatcggtaccggccccggcgacgccgggtcgaataaaattagcgagaagctaacggcccagcaggagagcggcgcgcagcggtgggatatcgacgtcgcggtagtgcaccagaaggcgggcggtgagcaggtggcaaagggattgctgcaaaaataccgtcaggatattcagaccggcggcatggtgagttcgccgagcgccatccaggcgctgggcgttaacgttgacggatacgtgatgccgatgttcttaagccagaccgctatcgcctggaacagcgatctggtcactaccccgccgacgtcgtatgacgagctggtggcctggacgcagaaacacccgcaggcttttggctataacggcatcaagaacggcatgtccggcgtcagctttgtggtgggctggatctacgcctacgggaccgacgcccagcgtctctccgccgggccctatgataaaagcgtcgaaaaaggctggcagcaggcctatgagaagctaaaggcgttcaataaaaacgtaactttcaccccgggcaacgccgggacgctcgatatgctgagccggggggaaatcgccatgggcccggtgtgggtcgatatgttctatagctggaaagatcagggcaagctgccgccgtcgatcaagcttgctttactggcgccgggcatgccgggccagccgatgtattacgtcatcccggcgaaggcggcgaatccgcagctggcgcgcgactttatcgcgctggccaccagcccggaagtgcaggcgcaggggatcgtcaagcagttcaactggtatccgggcatcgacgccgggcaggtgaagccgaagctggatgcggcgacctggcaaaagctgtttgccgaaatctcgccggaagcgctggcgaagtatggcaaaagcttcccgatcgccccctactttgacgatatcaaagagggttacgaaagccaggtggctaattaaacctttttccagcccgggccgccgtcccgggcgcttgcttgtgctgacgccaggtttattatgtccagttcattaaaatatctgctgctggttgccccggcggcgctgatgatcgcgatcctgtttttgtatccgctggggttttcgctggtctcggcgtttaccgcgccgggacagccgttcaccctcgatcacttccgcaaggtctatgcgctctacgccagcgatgtgctcttttcgctgcttatcgtgctgatctcagtggcgctgttagcgctgctcgccattaccctgtcggcagtgattgcgctgtcaccctgccgacccgttgtgcgtttgctgggttttttgtatcgcctgccgctgtttattccttttatcgttgttgcccagatgatgcgcacttttctcgccaaaaatggcctgatgaacaatgcgctggtggcggccgacctggtcacgccgctggagacgctctcctggctgggatggaaagggatagtgatcacctttgtctggaagcaactggcctttgccacgctgctgatctgcggggcgatggcggcgctggagtcgtcgcagatccttgctgcacgtaatcttggcgcctcccggccgcggatcctgttcgatatcatgctgccgcaggtcctgccgactatcggcgtggcgctggtgctgtcgacggtgaccatgatgtcggtgctgtcggtaccgttgatgatcggcgtgggggccccgacgatgctaaccgtggatatggcatttcgcgtcaattcctatggtgattacgcggtagcgaatgcgcttggcgtggtgtcgctggcgatctgcggcgcgctgtcgtggttttacctgcgccacagcctgcagcaaaaaggcggtgaatcatgaaagcgctggccctcgtatcaacctcggcatggtgggtgaaagggcgccgtaaagtgcgcgccagtccggtgctacagaccctgctgctgctgtttatgctgctggcgatgtttggtccgctgctgaacctgttgatctggaccgtagcggaaagctggtattttccccattcgctgcccagccggtgggggctgaagtactggtatcaggttttcaatccatacagcgatgtctccagctcgctgttaaccagcgtgctgatcgctctgttatcggtgggggtctgtttgctgatttccgtacccgccggctatgcgctttcccggcggaaaatgccattacggatgctgttcatgctgctatttcttatcccgcaggcctttcctaacctgacggtatacatgaatgttgccagattgttttatcagtggggattgaacggcagtatcgcaggggtggtgctggtgcatagcgtccacggtctgatgtactcggtgtggatctgtgtggccgcgttttcagccatcgacccgctgctggcgcgggcatcgcgtaacctgggcgccgggccggtgtataccttctggcacattgtgctgccgcaggcggcgccggggatcgttgccgccagcatctttgtttttctggagtcgctggatgagtttaccggcactttcttcgtcggggcgccggatatcaccacgctgccgctgctgctctataacgccagcatgtcgggtaactatcaggtctcgtcgattaccgcgctgattttgctggtcccatcgctgctctttatggtggtgatccataaatttatgcgtccggagatgatggcgaaattagggaaataagggctgcagaaaacgaaaaagcttcccgtcgggaagctttttaacctcaggtcatcatcattggccactctggcggcgtctgactcatgacttcaatcatcacatctttgatattgccccagattttggctatatcaagcagggtgataccgagcaaaccggtggcgaaccagcaggcggcggccaggccgaggcagctgcagatcaccgccagaccggcgtaatcgcttttgcgaagctgaatattcagtgagctggcgagaaacatcagtaccgcgctcaccaggggccagcgcaataatacgacactggtagtaatggaagccattaacctatcctcaaagaaagtcgggagccatggacgacctgacgcgactgacgatggcatagcgctctggtctcaactggcgtactagagagtgatgaaacgccatttctgtttcatcaacttgtgtgaactatatcacacttggcgctttattcaccagtcaaaaaatgagcttttgctgcgtttaataactatgaaatttgtgtggatattggtgagcaaccccgggaagcatattttcattcactgcctaatgattattattctgcgggttttattacctgttcttgtttattacacggagaaaccgagtcagatgcgcgtctattcttaatcttgccggaatatcttccgaatacctgataaataagtattattcatcaccatcagaggtaaaactgacgctcgtgagggctgtcggatgtcagctgatgtctatcgcaatcgcgattgctaacgtgttcgggctaccttaattaaggcatatcgcatggatgtaagcgtaaatgggtgacagtgcgccgcataaggcgctaagactcatcggaacaggtttggttattttattgccagtggtgctggcattgtggtttgcccagctgcgggctaaagccgaaaccattgatcaattacactcattttcgcagctggcgctgcaaaaaacggaaatggtcatccgggaagcggatcaggctcgggctaaagccagccagtatcgcggtgagttgtgttcagcggatcaccagcgttatttactgcatattgtgcgcggcctgctgtatgtggaagatctgatctacgctaacggccagcgctttatctgttcaacgtccgttcatcagcaaaccggctggcggatgccggcggctaattacaccaaaaagccggatgtcgcgatttactattaccgggacacgccgttttatccgggctttgccatgaattatatgcagaaggggccctatgttgtggtggttaatcccttctcgtacagctcggtgatcgccagcgaccgcgatttagcctatggcgttttcgataccaaaaccaacctctttttctcggtaagtaacaatgtcgagcccgcggaactccatgcgttaattcgcgaaggcgataccttttttaatcagaatggccgggtgtatacgatcgcccgctccgctattcgccccatcgccgtcattatgtccacctcgcgggccagctactatcacaacttttgtgaccaggccagtctgacgctgccgctggggataatttgcagtattttactggtgctggtgtggtcgcgcacccgccgacagtatcactcgccgcgcaatatgctgcagcgggctctgagctgccgccagctgcgcctgcactaccagccgattatcgatattaaaaataaccgctgcgttggggcggaagcgctgctgcgctggcctgggtttgacggtccggtgatgaacccggcggagtttattccgctggcggaaaatgaaggcatgattgcccaggtcacggactacgtggtggatgaactgttttatgaaatgggtgagtttctggccagccatccacagttgtatatagccatcaatctctctgcgtcggatttccattcggcgcggctgatttcacagatcagtgagaaagcgcacagctacgcggtctgtatcggacaaatcaaaatcgaagtgaccgagcgcgggtttatcgacgtaccgaagaccacgccggtgatccaggcgttccgcgaagcaggctatgaaattgccatcgacgatttcggcaccggctactcgaatctgcataatctgcacgcgctgaacgtcgatatcctcaaaatcgataaaaccttcgtcgatacgctcaccaccaacaacaccagccacctgattgctgaacatatcatcgagatggcgcgcgggttgcggttaaagacgattgcagaaggcgtggagacgccggagcaggtaagctggctctacaagcgcggcgtacagtattgccagggctggctgtttgcgaaagcgatgccggcgcgggagtttatgcagtggttagccaatgctcccgcgcccgcgaacgtgcctcagccgccgcgtcacgcggagatctgatggcgatagtcgctgggagtgcggtcaaactcgcggcggaacacccgggagaaggtttgctgcgagacgtagcccagatccatggcgatatcaaagatcggccgctgggtggttcgcaacgcttccgccgccagcagcaggcggcgctggcgaatatagtcccccagcgtctgatgcatcacggtacggaacatccgctgcaggtaccacttcgagtatcctgactttctggcgactatatcaatgttaagtggttgatcgatatgttcatcaatccattcaatcaaagtttgaataatatcctgatgggacataaagcggcctctctcaattctcgattcgtcgttttgtctgcaggcgagtataattcctcaagttaacttgaggtaaagcgctttatggaaaagaaatcaccccgcatcaaaatgctgttgacgcctggagaagtggcaaaacgaaccggcgtggcggtctcggccctccatttttatgagagtaaaggactgatccacagtcagcggaatgccggcaatcagcggcgctaccggcgtgacgttctgcgcgcggtggcgattatcaaaattgcgcaacgtattggcatcccgctggccactatcggcgacgcgtttggcgtgctgccggaagggcacaatctcagcgcaaaagagtggaagatgctgtcatcgcagtggcgtgaggagctggatcggcgcattcataccctgacggcgctacgcgaccagctcgacggctgtatcggctgcggctgtttatcgcgacgcgactgcccgctgcgcaacccgggcgataaactgggggaagagggaaccggcgcccggctgctggaagacgagtgataaaactaaagcgccacaactgggcgctttagttgttttccggtcttggtctttcgcattatctcgctggttcgcgagagggtttcccccgacgtcgacgtccctcagtattgcgcaatctgttgatggaggttccggtttgcgtcgacactttaactatggcatctgccgtcgctttttcctcactattttgctgaaattttcccggcaatgagcgcctgtttctatagttaatttgaacaaactacgggagaggctcatgctgacggtacatcatcttaatcaatcacgatcgcaacgcgtactgtgggcactggaagagctgcagctgccttatcagatagtccgctatcagcgggagaaaacgatgctggcgccggcggcgctgaaaaaaatccatccgttgggcaaatcaccggtactggaagataacggctatgtgctggcggagtccggggcgatcctcgagtatttgcaggaaacctgggacagcggcgggttgttgaagccgcagggaattgacgacaaactgcagtaccgcttctggctgcactatgccgaaggctcgctgatgccgctgctgttaatgaagctggtgttcgccagccttggcaaaccccctgtgccctttggcgttcgctcgctgggttcgctgctgggaaaggggatacagaaaacgtggctcgatccgcagctggccacccatgcgcggttcattgacgaccatcttgccgcacggccatggttcgctggcgagcggctgagcatggccgatatccagatgagcttcccggtgatggcattgttggcgcgcggcggcatgcatgaccttgtccatatcgaggcctggcgtcagcgagtggaacagcgaccggcctggcaacgcgccatcgagcgcggcggccccttcaccttacccggcgcctgagatatcagcggatccgatgacgtcgataaatgaaagcaactcactaaaaaattgttagcggattgcgcatggacgataacgtttgcgcatcgtctggttgttttctgttcgtcataagcgaaatttagcgaaatacgataaacatcggttgaaaagggttatctaaaggccggataatcgtttgcctttctgtttcgctcccccttttttctgctgtccgggggaggcgataaggttgaccaccgtagtgtatgcgcggagttaaacgtttgcttttttgcggcccccctggcgctgcgattcggtacatggagatcgcgtttaactggcagtggacggtccaccacgcatatcaacgaacgataaaaattttcaggggaagttttctatgtctacgccttcagcgcgtaccggcggctcattggacgcctggtttaaaatttcggcgcgcggcagcaccgtgcgtcaggagattgttgcaggtcttactacctttctggcgatggtgtactccgtcatcgtggtgccgggcatgctcggtaaagcgggcttcccgccggccgcggtgtttgtctcgacctgtctggtagcgggcgttggctcgctggcgatgggattatgggcgaatctgccgatggcgatcggttgcgctatctcgttgaccgccttcaccgccttcagcctggtgctggggcagcagatcagtattccggtagccctcggcgcagtattcctgatgggggtcctgtttacggtgatctcggcaaccggcatccgcagctggatcttgcgtaacctgccgcagggcgtggcgcacggtaccgggatcggcattggcctgttcctgctgctgatcgccgccaacggcgttggtctggtgatcaaaaacccgctggacggtttgccggtggcgttgggcaactttgacagtttcccggtggtgatgtcgctgattggcctcgcggtgatcattggtctggaaaaaatgaaggtgccgggcggcattctgctgaccattatcggcgtgtcgattgtcggcctgattttcgatcccaacgtccatttctccggcattttcgctatgccatccctgagcgatggccagggtaattccctgatcggcagcctggatatcgtcggcgcgctcaacccggtcgtgctgccaagcgtgctggcgctggtgatgacggcggtctttgacgccaccggtaccatccgcgcggtggctggccaggcgaacctgctggataaggacggacagatcatcaacggcggtaaagcgctgaccaccgactccctgagcagcgtcttctccggtttagtcggggcggcgccggcggcggtttatatcgaatcggcggcgggtaccgcggccggtggtaaaaccggtctgaccgcggtgacggtcggtgtcctgttcctgctgatcctgttcctctccccgctctcttatctggtgccggcctacgcgaccgcgccggcgctgatgtacgttggcctgctgatgctgagcaacgtggcgaaaatcgatttcaatgactttgttgacgcgatggctggcctgatcaccgcggtgtttatcgtgctgacctgtaacatcgtgacgggcatcatgatcggtttcgcgaccctggttattggccgtctggtctccggcgagtggcgcaaactgaacctcggcacggtgattatcgctgtggcgctggtggtgttctacgccggcggctgggcgatttaaacccttcgtgctcctcacgggcggctcaggccgcccgttttatttttaagccacatcctgtttccatttgcgttaatctgggtagcgtatgattcacaggcacgacgccttacaggtataaaagaaaacgcagcaaacagggaacacatggaaatattctttaccatcctcatcatgacccttgtggtctcactctccggggtagtgacgcgcgtactgccctttcaggttccacttccactgatgcaaatcgccattggcgcgcttctggcgtggccgacctttggtttgcacgttgaatttgatccagagctgtttctggtactgtttatcccgccgctgctattcgccgacggctggaaaacgccaacccgcgaatttattgaacacgggcgcgagatcctcggcctggcgctagcgctggtggtcgtgacggtggtcggcatcggctttctgatctactggattgtaccgggcattccgctgatcccggcgttcgcgctggcggccgtgctgtcgccgaccgacgccgtggcgctttcgggcatcgttggggaagggcggataccgaagaaaatcatgggcattctgcagggggaggcgctaatgaacgacgcctccggcctggtctcgctcaagtttgccgtcgcggtggcgatgggcaccatggtctttaccgttggcggcgccaccgtagaatttctgaaggtggcgattggcggcgtgctggccgggtttgtggtgagctggtcgtatggccgctcgatgcgcttcctcagccgctggggcggggatgaacccgccacgcagattgtcctgctgttcctgctgccgtttgcctcctatctgattgccgaacatatcggtgtctccggcatcctggcggcggtggcggcggggatgaccatcacccgttccggcgtgatgcgcaccgcgcccttggccatgcgcctgcgcgccaacagcacctgggcaatgttggagtttgtcttcaacggcatggtcttcctgttgttgggcctgcagctgccggatatcctctccagttcgctggtggcggcggaggccgaccccaacgttgagacctggatgctgtttaccgacattatcctgatctatgccgcgctgatgctggtgcgttttggctggctgtggtcgatgcgtaagctcagtcagcgcttcctgaagaagaagccgatggagtttggctcctggactacgcgcgagctgctgatctcctccgttgccggggtgcgcggggcgattaccctcgccggtgtgctctccattcctctgctgctgccggacgggaatgtctttccggcgcgctatgagctgattttcctcgccgccggggtgatcctgttctcgctgttcgtcggggtgattgcgctgccgatcctgctacgtcacattgaatcgagcgataatgtgcagcagcggaaagaggagcgtctggcgcgcgcggcaacggctgacgtggcgattgtggcgatccagaagatggaagagcgtctggcggcggataccaaagagaatatcgatacccaactgctgaccgaagtcagttcgcgggtgatcggtaacctgcgccggcgcgccgatgggcgtaacgacgtggaaacctctatgctcgaagagagtctggaacgccgcttccgcctggcggcgctgcgctctgagcgcggcgagctgtatcatctgcgcgccacccggcagatcagtaacgagacgctgcagaagctgctccacgatctcgacctgctggaagcgctgttaatcgaagatcaataacctgtaatccggatagcgcgacgcttattcggactactggcgagactgcagtaaatgtgtagccccggtaagcgttagcgcgaccgggggaaacccgggcagcggcgcaagcgcctgacccgggctaccccttcccttgcggaacgcgttgtcaccagagaattattccagccagaacgctttgctgcacgtcagccaggcttcagcgctgcgcgacatatatacgccttcccgccaaatcatccccagctcccaacgcagctcgctttgcaacgggatccagcaaaaattctgccggtcgagacgctggcaaatcggctccggcaggatcgctacgccaatgcccgcctgcaccatggcggcgagaaaatcccactggccgctgcgcaccgcgatacgtggcttcacgtcatgctcggcaaacagccgcatcagctgctggctaagggcaaattcctcgttgtagataaccagcggatgcgacgccagctcggccggcgagagcgaggttttaccttcccactccgcggtccttggcgtcaggacgcacagcgggtgattgaacaacggcagaatggtgaggctgctatcctcctcgacaggcagggcggtcatcgccatatcaagttcgccattgctgaccgcctgctggaccgtcaggccgccaaactcggcgatcttcagctcgacgcccggatagcgctggcggaagcgactgatcggctcggccatcagcatcccgaccatcggcggaatgccaagccgcagcacccctttatgcaggtggttgatatcgctcagctctgactccagctggctgaactcgcccaagatcgcctggccgcgttcaaaaacgacgcgcccggtatcggtgagcagtagtttgcggccgtcgcggatcaacagcgtgcagttcagctcatcttcgagattcttgagcatcttgctgatggtgggctgtgtgacaaacagcttttccgccgcgcgagtaaaactctgctgacgaaccacttcaacgaaatagcgcagcgttcggatatccataattattccctgagactatacctgcgatgattttaattcatttctgtccgcttcggcggctctctatactgctcgcctgacttctttttttcaggactatcgcacatggccttcgcgccagctcgcgttgcccccgccgtggcgcaacgacttcagatcccggtacaggtacttctctacgtcgggttattcatcttcgcacaatatctggtgaacaggtggcaggtaccgctgccggctaacctggtcggcatggtgatgctcctgctgctgatcgtctgccgggtgataccggtaagctgggtgcgcgccggcgcccgctggctgctggcggagatgctgctgtttttcgtcccggcggtggtcgcggtggtgaactacgcccagctgttgatggtcgatggttggcggatatttctggtgattgccttaagcacgctgatggtgctcggcgccaccgcctgggtcgttgacaaggtctatcgttacgaagtgggcaggttaaaaaaatgagcgatgccgtgctgagtatcctgtgcctggtggcgacgctggtcctctattacgccaacaaaaaactgtatcgacgttttcataaactccctctgatgccgctggtgttcacgccgatcctgctggtgctgattctggtggtaggccatatctcttatcagagctatatgggagagacccactggctgctgtggctgctgggcccggcgaccatcgcctttgccgttccggtgtatgaaaatgtcgcggtgattaaacgccactggatgtcgctcagcgccggggtggtgacggcggtagtggtggctgtcaccagttccgtatggctggcgcgcgggtttatgttgtctgatgaaattcagcgtagcctggcggtgcgctcggtgaccacgccctttgcgctggcggcggcgaaaccgctcggcggtcaacccgatttggtggcgctgtttgtggtgatcaccggcgtgtttggcatggcggtgggagatatgctgttcttacgtcttgctatccgggaggggatggcgaaaggagccgggttcggcgcggcttcccatggtgcgggaacggcgcgctcgtatgagctgggccagcaggagggcgtggtggccagcctggtgatgatgctgtcaggcgtagtggtggtgctggctgcgccggtcgtccgctggctgctgttttaacattatcgccagagtgaatgttaataaatattgaggagaggaatagctatcggctattccctgtttttgttattgatgtatttaacggttcatcataaaagattaagccaattcttatatcagcactgactttgtaactaaatgtttctctgcatgcccgtatttaattgtggggtaaatattatataaatatccaattatctttgcgaattttataactttataactatttgatttttatggttttgagtatggccactcatgcgttgcgatgttatgtcgcaaaaaatcaatttttacattaataattgagttcttacctcatgctagttattatttttacgcgagcttgtattattgaatggattcaaatgctggtcgtttatttatgaataatattaattgtcataaaccatatgtcatgtaaatacatgcatgacgccgcgctgcttgaatttcattctctaatatcgctgcataaagcaattgacggactgattgtcgtttataatggatatgggaataaatatgaagatgagtaaaaaatttctggcgggtgccctgattttctctgcctgcagcgcgctgtctaccgttgcgcaggctgataacaccattacctttaatggtattgtttccgataccacctgtacggcgaccattgatggcggtgtaacggctattgatatgggcaccacctcagtggcggatctgaaagcgtataccttcggcgctgccaagaacttctcctttagcttagctgattgcccgaccgcggaagaaggtggcaacagtatcgcccgcgtcacttttggcggtgtttccgataccgcgaacagcgattattttaaaaaccaggcaactgatgagccggcaaccggcgtcgctgtggcccttttcgacgaagcgggcaatgtgatgaagaataacgaagagggttctgatgttgatatctcttcgggtgcagcaaccattccgttcaccgttaaaatggtgaaatcgggtgatgccgatccgacgaaaggtaccgttcagacaaccgtgacttataacgtgacctatcattaattcggcttcttgttgaatggagaaaggggaatcgcctgctattccccttaaattaaacatatgagatatcctttttttgcgatcggtttattgctgtcttcttccttcgcgcaggccagcgtggtcgttggcggtacgcgtctggtttttgatggtacgaaaaataacgctgtaataacggttgagaataaagatcagaacagcaatatcgttcagtcctggctctcggtggttgatgcagcctcacccgccaaagacgcatttattattacgccgccgctgtttcgtctcaaagccggggagaaaggatttgtccgcgtagttcgatcaggaaagaaattacccgacgatcgcgagtcgatgttttggctcaatattaaagggatcccggcaacagaatatgtacctgataaaaatgtcgtacagtttgcgattaattcgaaaataaaattgatttatcgacccgctgcgttaaaaggtaatacaccggaatcgtacgctgaaaaattacagtgggggaaagagaggacgtcggtgacggtaaaaaataactcaccgctgtatatgaatttctcacaggttagccttaacggtaaaaatatttctggcgcatggtttgctgccccgttttccaccttaaaaatacccgtgcagagtagcctgtcggcgacaggaaaaaaagagatcacatggagcgtgattaatgattatggtatgtcagggaagaaatataccgctatcattcagtagcgttgagctgctattttcaactaaaagtatctgcgtcgctattattctgtgcctaagtactctaccctctcgcgcggaggccggcgaatatttcaacccaaatttactcgaagtcgccgagagtcctgcggcttcggttgatctatcctatttttcgcaagatggcataccgccgggcacctatcacctggatgtttacatcaacgataagtacgtcagttcagactcgctgacttttcaggaaattagccatgacgcaggcgcgactgcttctccctgcctgtccgcggagtatctgaattcatggttgattaataccaccgcctatccgcagttgttcgaggcaggggaaacctgcgcccggctgtcggcgatccccgggatgacgttctcggtatctcttgcccagcagcgcattgattttaccgtgccgcaggccgccatgctgaatcgccccagagactatattcccgagagccagtggcaacaggggatcaatgccggtcttctcaactatagcgtcaccgggcagcgtaatgcgccgcggcataacggcgccactatcgacagtcagttcgtcagcctgcagcctgggctgaatctgggaccatggcgcctgcgcaactacagcacctatagccacagcgataacaacagccgctgggagtcggtttactcctatcttgcccgcgatattcacaccctacgcagccagctggtggtcggtaatacgtatacctcttccggcattttcgacagtttgagttttaccggtctgcagctcagttcggacaaagagatgctgccggatagcctgcatggctttgcgccgacgattcgagggatcgcgcgcaccaccgcggaggtctcggtttatcagaatggttacagcatttataaaaccaccgttgctcccggcgcctttgaaattaacgatctgtacgccaccggcagcgccggcgacctgtacgtcaacattaaagagtctgacggcagcgagcaaaactttgtggtgcctttcgcgtcgctggcgatcctgcaacgtgagggccagctggactatgcgctgagcagcggcaggacgcgatcgggtagctccgacgataaagaatataactttattcagtcttccctggcctatggcgccaccagcaacatcactctttatactggtttccagcaggcggaagataaatataccaacctgttgttaggcgctggctttaacctcggtactatcggtgcgctgtcgtttgatggctctcagtcgtgggccgacgtgaaaaccagcgatacggcctcgtcaaccagtaaagagcaagggcaatcgtatcgcgtccgcttcagtaaaagctttctgcagacgggcaccagcttttccgtggccggttatcgctactccacctcgggatattattcgtttcaggactttgtcgataactcttccacacagcgcgactgctgtacgcagagcggcagaacgaaaggccggtttgacgcatcgttgtcgcagacgctgtttggctatggttcgctctcgctttcgttggtcaatgagacctactgggacagttcgcgtatggaatcggtgggcgtgggctatagcgggtcgattggcaaggcctcctactttattaactattcctataaccgcaatgtgcaaagcaccgatgacagcagcaataaccggccatccagcgatacggtcgtctccctgacgttaagtattccgcttggtgagacgctttcggcaaattacaccctgaaccatggtcggcataacgacaccacgcacagcgtggggctcaacggctcggcgttcgaggatcgttccctgaactggagcgtactggaagggtacaacacgcaggataaaagcacctccggcaacctcagcgtcaactaccagggttcgaaaggggatgtggctggcggctatggctacgaccgctacagcaatcactacaactattcgctgcgcgggggcatggtcgcccatgcgggcggactcacgctatcacggtttctgggcgagagttctgcgctggtcgaaacgcctggcgtcagcgatgtgacagtgcgcggtcagacaaacgtgacgacggatgccgccggatatgcggtggtgccttacgtccgtccgtaccatcgtaacagcctggcgctggatgaacaggaaatacctggcgctgaagtggataacgtcgccagaacggtggttccgacgcgcaatgcgatcgtcaaagtgaagtacgacacgcgaattggctataaggcgatgctcaccctgcgtacccgcaatggcgtggtgcctttcggcgcgctggtgaccctcgataatgatcacggtagcgcgtcgcgcagcaatatcgttggcgatgaggggcaggtgtatctaacggggctgcagaaaaaaggccagctgttagcgcgctggggggagaaaagcagtgagcagtgcaccgttcattatgacttctccggcatggcccttggcgacgatattctgttctatcaggcagaatgtcggtaatggatgcaggttttcaacatggaagaggggctgatatgaatatgcgagacggcagcacaaggggcctcctggtggccattttgctgctctcccttccggcgctggcttatgagggcagcagcacggtcaattttaacgtcacgggcaccatcgaagcgccttcctgtgaggtggccgtggagccgtcgaacagtatcgatttaggcaccgtctcctcgcagacgttctccggacatgccggggcgagcggcgccagcgtgccggttaagctggtcttttccagctgttccgccgatgcgtcggcggtgaccatcgcgtttagcggcaccagcttcgatagcacccacgcttcaatctataaaaacttccagactggcagcaacggtgccagcggcgtcggtttgcagctgcagagcatggccgaccagcagccccttggccccggcgaccagtatctctatacctttggggacgatgcggatatccatacctttaatatggtggcacgtatgttttcgccttatggccaggtaaggtccgggatggtcgggtttaccgccacgttcgatgtggcctacaaataacgtttcgacagggatgggtatgaaaaaactgatcttattgctcatattggcactgtgtcccgtctatagctgggcggcctgcacgggaaccaactatggcgatgtctcgatgaccaacctgccggaaaagatcctggtcaatgccgggagctataccgcagggacggtactgtatgactcggggaagattacgcgctcgcaaacggaattgcttaactgtgaggggagcacctacgcggtttttgcctggtcctcgaacaatgccggggcactgataggggataatatctatgccacctcggtgcaggggatcggtatccgcgtcaaggtgtggctcaatatcagcggtgaatatggcgatgacaccgatgatttcagccccgactcgcaggtgcattatattggtgatgtgaattattacctcggaaagccgacaggtcttttcgactctttcgcgtcgactcattataccccggcgtatcagctgcagctggtggccaccggcggcgccatcgccagcaagagtcaattatcgttcagcgacccggtggccacggtatcggccaaggataaaaaggggaccatcgctatttcacaactgcacatcagcggcaccaccagcatccagctaatcccgatggggtgtattgtcggtagcaataatctcagtttttccatgggcagcatcaatgccagtgagtttaataccgcgacgaaggtgggtagcgcgcggcagtctctgagcctctcctgcgagccgggaactaacgtttcgatgcgtgtggcggctgcttctgcaagcggggataaccctgacaatacggtgatggccctcacggcggaacagaatgccgccactggcgtgggagtgcagttaaatttgaatggcaaagcactgccgttaaataccgatatcagcctctatacttcgagccgcgcgacggtgaccaacagcggcgcggatgccagctacagctatttcaccaaccccgacagccccggaggcgcagcggccatgcagacgctcgccttatccactaactattacaggacggggagcgcggtgaccgcggggacagccaacgccaccggggtgatcacctttacttataactgagggggagaatcccttccccgaacgatgccggggaagggagaggacgattaatgcgcctggccgcgttcgataccgatcccggtttgtgaacggataaactgggcgcggaactgctcgcgctcgcgcatcccttccggtgagttatcggtggcggagaagacccagatgccaatgaacgcgatggcaatggagaacagcgccggatattcatacgggaacagcgctttctcatggccgaggatctgcacccaaatggtggggccgaggatcatcagaatgaccgcagtcagcaggcccagccagccgccgaccatcgcgccgcgggtggtcagcttcgaccagtacatcgacagcagaataatcgggaagttacagctggcggcgatggagaaggccaggccgaccatgaaagcaatattctgattttcaaacagaatacccagcagaatggccaccaccccaaggatcagcacggtgatcttggagaccttcagctcctgacgctcggtcgcgcccttgcggaagacgttggcgtacaggtcgtgcgacaccgctgacgcgccggcgagggtcaggcccgccaccaccgccaggatagtggcgaaggctaccgcagagataaagccgaggaacaggttgccgccaaccgcatccgccaggtgcaccgccgccatgttattgccgccgataagctgtccggccgcgtctttaaacgccgggttcgcgccgaccagcatgatggcgccgaagccgatgataaaggtcaggatatagaaatagcccataaaaccggtggcgtagaagacgcttttacgcgcttctttggcgtcgctcacggtaaagaagcgcatcagaatatgcggcaggccagcggtaccgaacatcagacccagacccagagagagcgcggatatcggatctttcaccagtccgccgggactcataatcgccgcccctttcgggtggaccgccatcgcctcggtaaacaggttattgaagctgaagccgacgtgcttcatgaccataaaggccataaagctggcgccgcacagcagcagaaccgctttaataatctgcacccaggtagtcgccagcatgccgccgaacaggacatagagcaccatcagcacgccaaccagcactacggcgacatggtaattaaggccgaacagcagctggattagcttgccggcgcccaccatctgggcaatcagatacagggccaccaccaccagcgaaccgcaggcggagagggtgcggatcggcccctgcttcaggcggtaagaggcgacatcggcaaaagtatagcggccaagattgcgcagacgttcagcaattagaaacaggataatcggccagccgacgagaaagcccagcgagtagatcagcccatcgtagccggaggtatacaccagcgcggagataccgaggaacgacgccgctgacataaagtcgccggcaatcgccagcccgttctggaagccggtaatattgccgccggcggtgtagtaatcgctgcgcgaacgcacccgttttgaggcccagtaggtgatgtacagcgtcagggcgacgaaaatcaggaacatgacaatcgcctgccagttggtcggctggcgctgtaccgcgccggtaatagcgtctgcggcgtgggcgccgaggggcagcagcgtggcggcgagcgccgtcaggactctcttgatcatgcttttacctcgttgagaacgcttttggtcaaacggtcgaattcaccgttagctcgccagacataaataccggtcaggataaacgaaatgacgatcacgccaatgccgagcgggatcccgcgggtgacgctggttccggcgtgcagcggggtgccgagccagccgggtgcaaaggcgataagcaaaataaagcccacgtagatcactaacataatcactgacagaatggcggcaaaccgttgccgtgatgcaactaactccctgaaatgcgaactattttctatccgctgacaaagttgttcattcatcttagcgtctccagaggtctccctttcgtcatccactcggcggacgctggcgacagcaacccctccggcgacggagccgggacaggtgttgctgacggcgttcctgcgagtgaaatcctgggggagggacttatttttatcctctccccggaaggggagagggtgtagggaatcggtccttacttacgatggcatggtaatggcctgcttctcttcgagcagtttttccacgacgccaggatcggcgagggtcgaggtatcgccgaggttgctggtgtcgcctgcggcaatcttacgcagaatgcggcgcatgattttgcccgagcgggttttcggcagcgaatcggtccagtgcagcacatccggcgtcgccagcggaccgatctctttgcgtacccagttacgcacttcggcatacaactccggcgtcggttcttcgccgtgattgagcgtcacgtaggcatagatggcctggcctttgatgttatgcgggatccccaccaccgccgcttcggcgatttttgggtgcgacaccagcgccgattcgatctcggcggtccccagacggtgtccggagacgttcaggacgtcatccacccggccggtgatccagtaatagccatcttcatcacgacgcgcgccgtcgccgctaaagtacatatttttgaaagtggagaagtaggtttgctcaaagcgctcatggtcgccgaacagggtacgcgcctggccgggccaggagtcggcgatggcgaggttgccttcggtggcgccatccagcggcaggccttcgttatccaccagcaccggctggacaccgaagaacggacgcgtcgcggagccggccttcagctcaatcgcgcccggcagcggagtgatcataaagccgccggtttcggtctgccaccaggtgtccatcaccgggcacttctcgttaccgatcttcttccagtaccactcccaggcttccgggttaatcggttcgccgaccgagccaagaatgcgcagcgaggagcggtctgtgccttcgatagctttgtcgccttccgccatcagggcgcgaatagccgtcggggcggtatagagaatgctgaccttatgcttatcgacgacctggcacatgcgcgccggcgtaggccagttcggcaccccttcgaacatcagggtggtggcgccgcaggccagtgggccgtacagcagatagctatggccggtgacccagcccacgtcggcggtgcaccaataaatatcgcccggatggtagtcgaaaacgtatttaaaggtggtggccgcatagaccagatagccgccggtggtgtgcagcacccctttcggtttaccggtggagccggaggtatagaggatgaacagcggatcttcggcgttcatttcgacgggccggtgttcggcgctggcgtttgcaatcaggtcgctccaccacagatcgcggccttcctgccagtcgatattgccgccggtgcgtttcaggaccaccacgtgctcaatgcttttcacgttcgggtttttcagcgcgtcatcgacgtttttcttcagcgggatggcgcgaccggcgcgcagcccttcgtcagcggtgatcaccaggcgtgagctggagtcgataatgcgtccggccaccgcctccggcgagaagccgccgaaaatgaccgagtggattgccccgatgcgggcgcaggccagcatcgccaccgcggcttccggcaccatcggcatatagatagcgaccacgtcgccttttttaatcccgaggtcgagcagcacattggcgaaacggcacacgtcggcatgcagttcacggtaggtgatgtgcttgctttggctggcgtcgtcgccttcccagatgatggcggtttgatcgccgcgttcggcgaggtggcggtcgagacagttagcggcgaggttcagggtgccatcttcataccatttgatggaaatattacccggtgcgaaggaggtgttctttacacgggtatagggccgcatccagtcaaggatcttgccctgctcgccccaaaatgtatcagggtcggttatggattgttggtactgcgccttgtactgatccgggttaatcaggcaacgttccgcaatattagcgggaatagggtgtttgtgaatttggctcatggctttttttctcctttgaacttgttaaatatatgtcaaacaaacgttaagagtaggggttttgacagctttgtttgttaattggggggcagatcacgcaatgattaaactgggtgaaatttcatcaaatgaaactttgaagcgaaataattacgcaaatgaatttatagaaacggaagctgtgaaaatttttttattacaaatacttatgcaatataactgggggaaattcgctgctttatgcataaaagcagaggaaagccctgttcttaaaggcttgcgcagcatgccgtgcaaatgatactgatattgcgcgttaaataaccccacaaagcaacgcaacacaattcataccccctgcagtgggtaccatgacgaaaaggaatggtgcctttcattgaggaagtcagtagtgaagaaaacaaaaaaagtcagtctggcctggcaaattttgctagccctggtgctgggtatccttctgggcagttatctgcattaccacgctgaaagtcgcgattggttaattagcaatttgctgacgccggcgggcgatatctttatccatctgattaaaatgatcgtggtcccgattgtcatttcgaccctggtggtcgggattgccggcgtgggtgacgccaaacagttagggcggatcggtgccaaaaccattatctatttcgaagtgatcaccacggtggcgattgtgctgggtatcaccctggccaacgtcttccagccggggacgggcattgatatgtcgcagctggcggcagttgatatttcgaaatatcagaacaccaccgccgaagtgcagagccatgcgcacggtctgatgggcaccatcctgtcgctggtgccgaccaatatcgtggcatcgatggcgaaaggcgatatgctgccgattatcttcttctcggtgctgtttggcctggggctctcctcgctgccggcgacccaccgtgagccgctggtgacggtcttccgctctatctccgagaccatgtttaaagtcacccatatggtgatgcgctatgcgccggtcggggtattcgccctgatttcggtaaccgtcgccaccttcggtttcgcctcgctgtggccgctggccaagctagtgttgctggtttactttgcgatcctgttcttcgcgctggtggtgctggggattgtcgcgcgcctgtgtggtctgagcatctggatcctgatccgcatcctgaaagatgagctgattctggcttattctaccgccagttcggagagcgtactgccgcgcattattgagaagatggaagcctacggcgcgccggcgtcgatcaccagctttgtggtgccgaccggttactccttcaacctcgatggttcaacgctgtatcagagcatcgcggcgatctttatcgcccagctgtacggtattgacctctctatctggcaggagattaccctggtgctgaccctgatggtgacctcgaaagggatcgccggcgtgccgggcgtctccttcgtggtgctgctggccaccctgggtagcgtcgggatcccgctggaagggcttgcctttattgccggcgtcgaccgtatcctcgatatggcgcgtaccgcgctgaacgtggtgggtaatgcgctggcggtgctggttatcgccaagtgggagcataagttcgatcgcaaaaaagcgctggcctatgaacgcgaagtgctgggcaagtttgataaaaccgcccaataaaacacaaagcccggcgcgatagcgccgggctttttcttatcctttactaatccggtcaaactcttcgcagccggtatcaaacccctccaggcaactgacgttgagccagtgcagcgccttctgcttattcggttcgataaagcctttctctccctgctggaacatcatcccggcccagtattcggcatagccggtgcgggaaagtgatgaactgcctttaaagtattcacttgctttcacatcatcctccgggccgtgtacgccgctggcgtagatcagccccagcagcatctgggcatctaccgccgcatcgctttcgctatcccgggcagcatcctgcagcagcgtgatggcgtgcgctacgtcggtggcgccagcctgacggttgaccagcacccgcgcgaggacgatctctccggatttactgccggcctcgacggctttttccgccagctggcgggcctgcggatagtccgcctgttgggggttacggattttgagctgcgccagcagcgccagcgcatcgccatcgccctgggcggccgccttctgcgcccagtattcggctttttgataatcgccggagctgacccaggtatcggcaaggtaatattgcgcgcgtcgatcgccggcttcggcctgctgttgatactgactgccaggttcggtggccaccgctgcgccgctggtgaaaaccagtagaaataaaaagaggtatttcatttgtatttattatcagtaaggaacatagcgcgcagtataaagggaggcgaaaaagaagaaaatggcgggtatcggtaggtagggccgatttgcgttacctgaccgtaggcccgcgcaagcgcagcgccgccgggcggcagactgcggacacggagccgtttatgtgccgggtggcggctgcacctgacccggccaacgcatcgcgcgagccgggtcagaccgccgaaccttaacccatcgcgctttcgcgcaggcgggatttcagcttgttgtactcgtcgatcacgtactgttccgcggcgcgctgatcggcaatccgctcaacgttgaccgcgcagtacttgtactccggcgttttggttatcggactcaggttctctgagaccagttcgttacaggcgccgatccaccactggtaggtcatgtacaccgcgcctttattcggccgatcgctgacctgcgcgcgggtgatgatgcgccccttacgcgaattgacccataccagctcttcatcttcgatgcctagccgttcggcgtcggcggtgttgatttgcgcatagcctggttcatccgccagcgccgccagcgccgcgcagttaccggtcattgaacggcacgagtaatggccgacctcgcgcaccgtcgacaataccatcgggtactcgtcggtaagcttatcgatcggcgcgacccagtcgcaggtgaagaactgcgccagtccgttcggggtatcgaacttctctttaaacagatacgacgttccctgatcggcgtcggactcatcgcggcacggccacatgacatagccgagctcacccattttctcgtaggtggcgccgtagaagtccgggcacagatgccgcaactcgtcccagatctcctgggtgttattgtaatgcatcggatagcccatccgggtggcgatttcgctgatgatctgccagtcggttttcaggtcccacttcggctccaccgctttaaagaagcgctggaagccgcggtccgctgcggtatacacgccttcgtgctcgccccacgaggtggacggcaggatgacgtcggccgcggaggcggttttggtcatgaaaatgtcctggacgataaccagttccagatcgtcgaacgctttgcggaccgccgagagttcggcgtcggtctgcagcggatcctcacccataatgtacgccgcccgcacttcaccgtgcgccgcgcggtgcggcaattcgctgatgcgatagccggtatgcgcaggcaggctttccacgccccaggctttggcgaatttttcgcggttctccgggaacttgacgtactgatagcccggataggtatccggtagcgcacccatatcgcaggcgccctgaacgttgttctggccgcgtaccgggttgacgccgacgttcggcttgccgaggttgccggtgaggatcgcgaggctggtcagcgaccgcaccgtctccacgccctggtagaactgggtgacgcccatgccccacaggatggcggcggatttggcgctggcatacatccgggcgcaggcgcggatctcctgggcgctgaccccagtgatctcctccaccgactccggcgtatagccttcaacgattttgcgatactcctcgaagccttcggaacggctggcgacgaaggatttatcgtacagatcctcttcaataatcacgtggccaatggcgttgagcagcgcgatgttcgagccgttcttcagcgcaatgtgcatatcggcgatgcgcgcggtttcaattttgcgcgggtcgcagacgataattttcgccccgttgcgtttagcgttaatgacgtgattcgccacgatagggtgggaatccgccgggttgtaaccgaagataaacaccagatcggtgttatcaatctccgtgatggcattactcatggcgccgttaccgaccgactggtgcagacctgcaaccgaagggccgtgtcagacgcgagcgcagcagtcgacgttattggtaccaataacggcgcgcgcgaatttttgcatcacatagttggtttcattaccggtgccgcgggaggagccggtggtttggatcgcatccgggccatatttggctttaatggcgctgaggcgggtggcgacgtaatccagcgcctcgtcccaggagacggcttccagcttgccgccgcgttgacggcggatcatgggggttttcaggcgcggcgttaggatctgggtatcgttaatgaagtcccagccataatagcccttcaggcacagggttccctggttggttttcccctgcgccgcttcagcccgaacgattttgccgttatcgaccaccaggttgattttgcaacctgatgcgcaatacgggcaaaccgtgacgacttttttcatcggtcttgctccagttattcaatgggcgcgtttgcgctatcgcgccgtcactatgcatcttctatgccatattttcattgtgggtattccttgatgatacgcgggttttttgggcggaatgctgacgaaaaacagcctgtcgacagatttgacgtgtcgataccctggagatgtgacggcgcttgaaaaaatgtcaccgggagaggaatttgtcggcgcaggcttgcagaatcgatcagactgacactaattcccggcgggcagaggcaaaaatgaaaccagtcattttagtggtggatgatgacagggcgatgggcgagctgctcagcgatgtgctcggcgcgcacgcgtttgaagtgcttgtcagccagaccggcaacgacgcgctgacgacggtggcgcagcgggcggatatcgcgctggtcttactggatatgatcctgccggatacccatggcctgcaggtgctccagcagctgcagcgcacgcggcctgagctgccggtggtgatgctctccggtctgggcagtgagtctgatgtggtggtgggtctggagatgggcgccgatgattacatcgccaaaccgttcagctcgcgggtggtggtcgcccgggtgaaagcggtactgcgacgcagcggggcgctggccggcgaggcgtcgggcgccggtgctggcctgacgtttaacggctggcggctggataccacgcgctgtgaactgtataacccgcagcagcaggcgatcccgctgacccagggagaatatggcctgctgctggcgctggcgcagaacgcgcgccgggtattgaatcgcgaacagctgctggcgctgacccataacgaaagcaccgaggtattcgaccggaccatcgatgtgctgatcatgcgcctgcggcgcaaaattgagctcaacccgcatcagccgacgttgattaaaaccctgcgcggtctgggctatgtcttttccgccgacgtgacccacagcgagaaggcggcgtagggcgggtttgctgccaacccgctgttgactttatttggcgcagggagtttactttttttattaaagtgacactctgggttaatctatggcaacaaaattaaactggctgctgcaaaacagcgctcccggagatgtgatccttcagtcctggttaagccagcatgccatctctccctctctgtcctttaaatacgcgcaaagtggctggttaaaaaaaagaggcaacggcgtatatgcgcgtgcgggacgtgagccggagtggaacgatgcattagcatgtttgcaaaatcagcttgccgctccggtgtatgttgcggggctcagtagcttagtctggcagggccgttcacactatctacagctaaaacaaaaccagtgctggcttagtgtggaaaataaagcgctgctgccgaaatggttcagggaattcccgggtgtggagtggatagtcatatcggggaaaaaactgccggtgctggatgatagataccgtgtaacgcttgatataaaagggaaaaaactcatcggcagtgcgccagaactggctgcttacgagttgctgagcgcggtgccggggaccctctcatttaaccacgctgcagagcttttccaggggctggttaatcttaatcctcgtaaagtagagtatcttctttccgtcagccagtccgtgcaggccaagcgtttgtatctcttcttcgccagtttttacgagcatggctggctcaaacgaatcgatagccaaaaaatcgatctgggagcgggcaagcggcaaatcgtggaaaatggaaagttcaatgctcaataccaaatcacagtgcctgaacgctttcaaaaggaataaaaaatatggatatacaggcgccttattatcggcaggttgctctgctaatgcaggttttaccctatgttgctgtcgaacgggaatttgcgctgaaaggtggcactgccatcaatctctttatccgcgatttccctcgattatcggtggatatcgacctcgcctgggtgcccctggaaagcagagccatcgctttacctcatatacgggatgcgcttgcacgtattgccgccaatctgcaacaacaggcaggtatgagcgctgtattacaagctaatcgttcagatgagatgcgtgtcattgttactaccgatagcgcgcaaataaagatagaggtttcaccggtcgcccggggaacattatatccaccacaggagcgagaagtggtgggggcggtagaggacgtttttggctatgccagccttccagtggtttcgttgcctgacctctacggtggaaaattatgcgcggcgctggatcgccagcatcccagagatttttatgacgtgaaattacttcttgatgcgcaggagcttgaccgtcccattttcaatgggtttatcgtgtatttactgagccataatcggcctctggctgaagtgctgaatcctcgctggaaagatattgctgaacctttttaccgtgaattcagcgggatgacatttgagacgatagccctggaggaactgacagcagtccccaacaggatgattgctgcgttaaaatcctgtttcacacaacaggatgtcgattttttactgtcatttaaacgaggcgaaccagactggcgtttagcgccggaaatgcgtattcaggatttgcctgccgtgcagtggaaattgcgcaatattcatcagatgccagcgataaaacgcgctgagtcattagataaactggaaaaggtgctggccgagtggcgcagttagttacctggcccgcccttgttgaactcagcgtaaaacaggcgtgatttgaataaaccgtatcccttttctcgccatgatacgccgttctcctgtggcatcgccctgatagcgggatctactcgatctaaccatcctgcaattgtataaacgcctgcagctcagggagcgttttggcgccgtcgatcgcattggcggcctgcaggctggcgcgggcgcaggcgtgagccagctgcagactggcggttaacggccagcgttcgtggctgccgtacagcaggccggcacagaaggcgtcccccgcgccgacgctgccgataatctcctccggcggtagccgacatgacggtacccagcgcccggcttcggtacgggagacgccccatgccccctccggacaatggatcactacccgctggcgtacgccggcgtcaagcaatgcgctggcggcgcgggcgatattggcgacgtgcggctcgccgttgggtagacgaatctccagcccgctaaactcgctggcttccagttcattgatggtcaggtagtcaagatgcttcagcgccggcaggaccagcggccggtagcgcgggtcgcctttgcgcgacaccagatcgagggacacctcatagcctcgctcgcgcatctgcgccagcagtcgcgcgctgcgggtgccgtacacttcatcggggcgatcgaggctttcgagcagcagcagatagccgagatggaaaattttcagcggcgcatccagcggctcaaaagccgggagatcaagcaggcggttggcgccgggagagtgaaagaaagtgcgctggccttcggcgtcggtcatcacctgggtcatcgaggtgggggcggagctggtgcgctgtacgagctggcgattgatatggtactgatcgagcatggcggtgatgtagtcgccatcgttatcctcgccaatcaggccgaccgcctgcagcggcagcccggcgtgcattttggccagggtcagcaggacattcagcggcgcgccgccggtggcgcgttcgctatggacaatttccaccagccagccgcgctccggccactgcccgatctggtggacatgatcgaccagcatgttgcctgcggcaataatgcctttccgttccatgatcgctactccgcgccgtcatattcgttaagcgtagcgcacaatcggcggaacgattgtgcgcctggttgcgcttatttcacggtccagcctttgtaagagctgacgttatttttgtcgatcatcgtcaccgggatcagtaccggcgcggtcggcgcaggtttgccctgcaggatgtcgtagccaatctccaccgccttcgctgccatcacctgtgggtcctgcgctggggtggcgacgaacagcgagttcttacgcttcagcgcctcttcgccgtccgggctgccgtcgacgccgacgatgaagaactcgctgcgctgcgcctgtttcgctgccagatcggcaccaatcgccgtcggatcgttgatcgcgaacacgccgtcaatcttcggattggccgccagcagggaggtcatcacctccaggccgccttcccggctgcctttggcgttctggttggcggagaggattttaatgtccgggtgttttttgaactccgtttcgcagccttcgacgcggttttgtacggcggagaccggcggcccgttgatgatcaccacgttgcctttgttgttcaggcggtcgctaatgtatttacaggccagctcgcccgcctgggtgttatcggaggtgatggtggcgtcggccccttcggcggcgacgtcaaccgccaccaccacgatcccggcctctttggcccgcttcaccgccgggccaatgcctttcgaatcggcggcgttgaggatgatcatatcgactttggcggcgataaagttatcgatctgcgccacctgctggcccagatcgtagccgctggagaccagcgtcactttgacgttatcccccgccagtttgcgggcctccagctccgcccctttggtgatctgcacaaagaacgggttggcaaggtcgcccaccgtcacgccaatcgctttcagctctttggccgacgcaaaaggggaggcggccagcagcgcgccagcacacagcgcggtgactatcggttttaaacgcattcgcttttcctcgcaggtaagatgttgttgttatgcactttgatgatgtcgggtacggtatttgtcgatcagcaccgcaatgatgatcaccgcccctttgatcaccagttgccagaagtaggagacccccatcagggtcatgccgttattgagggtggcgataattagcgcccccaccagcgtaccggtgatggtgccgataccgccgacgaagctggtgccgccgagaatgaccgcggcgatggcgtccagctcgtagccgacgccgaggttgccgttggcgctgtacagccgcgaagcgctcatcaccccgccaaggccggagagcaggccgctcatgccatagacaaacagcagcaccagccagactttgatgccggtcagccgcgccgcctgcatgttgccgcccaccgcgtagatatgcaccccaagggtggtgcggcgcaggataaaccagcacaccgcgatcaccgccagggcgatgactaccagccacggcaccgggccgaggtagtcattgccgatccactcgaagctgatatcggagttgatcaccgtggtgccgtcggccagcagataggcggcgccgcgcagcgccgtgtaggtgccgagggtgacgataaacggcggcagcccggcgaaggcgaccagcgcgccgttgaacaggccgagcagcaggccgagcatcagcgccgccggaatcgacagcaacgcaaacgccgggatcagcgacaccaccatcgcggccactgcggtggtgccaaggatggagccgacggaaaggtcaatgccgccggtgaggatgatgaaggtcattcccgccgccagcacaatgttgatcgaggcctggcgggtgatattcagcagattgctttccgtgaaaaagttgggggcgataaagccgaaaacggcgacgatcaggatgaggatcggcagaatgccgacggtctgcatcaggtcgcccatcaacatttttttcgccgaagcggatttcgcgaccggcgcggaggtctctttcggtatgctcatagttgccctgccttaaggtgagaatcggtcacgccggtggccagcgtcatgatactttcctggctaatatcaccggcctgtagctcgccggcgataacgccctcgcgcatcacatagacccggtcgctcatgcccaccacttcgggcagctcgctggagatcatcagaatggcgacgccctggcgcgccatgtcgttcatgatgcggtaaatttcgcttttcgcgccgacgtcgacgccgcgggtgggttcatcgaggattagaatgcgcgggccaatcgccacccagcgcgaaattaacagcttctgctggttgccgccggacagtccgccggcgcgcacctgggcgtgcggcacgcggatgttaagcaactggatggcgtcatcggagatggtttgcgccttccggcggttgagcatcccccaggtcgcgtcgcgctccagcgtcgccatggtgatgttttcctgggctgccagttcgagaaacaacccctgttctttgcggttttcggtcagaaagccgatcccgaggtcgatggcttcccgcggcgagtggatcaccaccggctcgccgtcgatctcaatcaccccggcggtggctttgcgcaccccgaagatcagctgcgccagttcggaacgcccggcgccgaccagcccggcgaggccgacgatttcgccggcatgcaccaccaggctgctgggcttaatcttgccgccatcggtcagatcctcgacccgcaggcgcggctggccgcggggaatgtcccgttctttattgaagagatcgctgagcggccgaccgaccatcatgcgcaccagctccggcgcgttgagcttgtcgcgcaccaggctgccgacatactgcccatcgcgcaggacgctgacccggtcggagagctcatacacttccgccatgcggtggctgatatagatgatcgccatcccctcatcgcgcaggcgcaggatgagctcgaacaggcgctgggtttcccgcgaggagagggcggcggtgggttcatccatcaccagaatgcggctttgacggtgcagggcgcgggcgatctccacctgctgttgttcggcgatggtcagggtcatcacccggtcgctggctttgaactgggcgccgagacggtcgatcaccgcctgcgcctggctgagcatggctttgcgctgcaccagaccaccgcgcgccagctcgctgccgaggaaaatgttttccgcgacggtcaggttcggcgccagctgcatctcctggtagatcaacgtgatcccggcggccagcgcgtccttggggccgcggatcgtttgcggttttccgtcgatcaggatctcgccgctggtggcggtataggcgccggcgaggatcttcatcagcgtgctttttccggcgccgttctcccccatcagggcatggatctcgccgggccagaccgtcaggtcgacgcccttcagcgcgtagaatttgccaaaagctttggcgatatggcgcatttccagtaccggggtggcggtcatcgcggcgctcctgtctgtaagaacaatagctgcagtccaccaccggaaaataaatgcagaatgtcagaatccattcatatttgtcatagtgataaatagttaaccgcgatcacagttacgcggcgtcattttctgcaccgtcacgcttatctgccgaccgatccttcaccggagttgttatgaccgctcgccgacacccgtttttcaccagcgcccgtggccgcctgctctcctttaatctgctgatgggcgtggtcaccctgttggtcagcggcgtggcggtgttcggctttcaccacgccagccagctgcaggagcaggtgcagcgccagactctcaacgacatgcgcggcagtatggatctggcgcgggacacggcgaatgtcgccacggcggcggtgcgcctgtcgcaggtggtgggggctctggagtacaaaagcgaagcggaacggctgctggcgacgcagcaggcgctgaagcactcgctggcccagctggcggcggccccgctggcgcagcaggagcaggcgcgggtggccaatattattcgccgcagcaacgcgctgcagcagagcgtggcggagatgctggagcgcggccagcgccgccatctgcagcgcaatgcgctgctgagttcgctttaccagaatcagagtaacctgcgccatctcgccgatcttaacgatcgcggcggggataaggcgatcgatccgcgccggctggccgagatggaccggctgatcgtggctgcgatccataccgtcacgccgcggtcgatcgtcctgcaactcgaccagctgcgcggcgccctgccgacacgcagcgccgatcccgcgctggcgtttgtcctccctgatgtgacccgcgaactggcgacgctggccccgctgtcggcccagctggaggagagcgacctgacgatcagctggtacatgtatcacatcaaagcgctggtcgcgttgcttaacgaagatatcaatcagtacgtgacccgggtggcggaagcctcagagcagcgggcggcgcagagccatcgggagctgcgctccatcagtatgtttattctgctttccgcgctgctggcgctggcgatcaccggctgcgccgggtggtacatctaccgtaatctcggctcgaacctgaccgccatctcgcgggcgatgtcgcggctggctcagggagagccgaacgtctcggtgccggccctgcagcggcgcgacgagctgggggagctggcgcgggcctttaacgttttcgcccgcaatatggcgtcgctggagcacaccacccggctgctgaaagagaagaccaaccagatggagatcgatcggattaagcgccaggagctggaggaggcgctgctgcatagtcagaagatgaaggccgtcggccagctgaccggaggtctggcgcatgactttaacaacctgctggcggtgattatcggcagccttgagctggtggagccggatgcgcgcgatgcgccgcgcctctccagggcgctgaaggcggcggagcgtggggcgcttctgacccagcggctgctggccttttcgcgcaagcaggcgctgcatccccaggcggtggcgatggcgccgctactggagaacctcagcgagctgatgcgtcattccctgccggcgaccttaagcctggagattgaggcgcagtcgccggcgtggccggcatggatagacgttggccagctggaaaatgccctgatcaatctggtgatgaacgcccgcgacgccatggcggggcgcgacggggtcatcaaaatacgcacctggaatcagcgggtcacccgcagcagcggccagcggcaggatatggtggccctggaggtgatcgatcatggcagcgggatgtcgcaggcggtgaaagcccgggtgtttgaaccgttcttcaccaccaaagccaccggcagcggcagcggcctggggctgtcgatggtgtatggctttgtgcgccagtctggcggccgggtggcgctggagagcgcgccggggcaggggacgacggtgcggctgcagctgccgcgagcgttgaccgaggttgagaaggaggtggcgccagcggtggacgagccgcccccggcgggcgagcggctggcgctggtgctggaagatgaagaggatgtccgccagacgctatgtgaacagctgcatcagctgggctggctgacgctggaaaccgccagcggtgaagaggcgctgcagctgctggaggcctcgccggatattgccctgctgattagcgatctgatgctgcccggcgccctgagcggcgccgatgtgatccataccgcccgacgccgctttccggcgctgccggtgctactgatcagcggccaggatttgcgtccggcgcagaacccggccctgccggaggttgagtggctgcgtaagccgtttacccgcgcccagctggcgcaggcgctgagcgcggcgtacgcgaggatttgagattcctccgctacccgggtttcatgcggatgattaaggtagcggcaggactctgatgagattggccccgatgaaacgttacgcaaccgcactgctcttttgcactctgtcgctgaccagcctggccgctcgcgccgatattatcgatgacgcgatcggcaatattcagcaagccattaacgacgcctataacccgggcagcagtcgctccgatgacgacgacagatacgatgacgatggccggtatgatgacgggcgctatcaggggagccgtcagcagagccgtgacagtcagcgccagtatgacgagcggcaacgccagctggacgagcgccgccgccagctggatgaacgccagcgtcagctcgaccgcgatcgtcgtcagttagaaagcgaccagcgtcggctggatgatagctactgatcgccccccgcaggccagcgtttaatccagcgctatttccatcccgtcatagcccgcttcgaaacctgtcggcagcgggttatccatcatccagacgtcaaactggtggctgatatgggtgaggatcacccgcggacagccaatgacctggttaaggctgcggacggtgtttagatcgttatggttacgcggggtctgcgcgcgcggctcatgactgcagtcgatgatcatcgcctgcgggcggttattgagcaaaaacttcagcgtcttgtccggcagcccggcggtatccgagagccaggccagccggctgtgggccgactccagcagataaccaaaggtcagcttcgagtgattaaggggtaggggcgtcacccgcagcccctgcaggttaaacatcacaaacggcgtgacggtatggctaaagtcaagcagaccggggtgtttgagcagatcgtcgcagccggcgtcatccggcgggccatagaccggaatcgacgcgccgactccccagcgcagcggaaatagcccctgcacatgatccagatggtagtgggtcagcagcacctgttgaaagctgccggcgggatgatgctccatcagatccggtcgtccggcatcaagcagcgtcacggcgctgttgaacgtgaccactccgctacaggggcggcgtcggtggctctcctcgcggcgggcgcggcggcaggccgcgcagtcgcagccgaagaccggcaccagctgagcgccgccggtgccggttaagcggagggtcaggctcatcgtgtcaccttttgtttataccagttgatccgcttcgcgcgccgcgtggctgcgcagcaggcggaaaaattcatcgaccgattgtcggagactgccgtcgttattcaatgtcaggcagttgtccggcttatagcgcgcggcgcgttccagacgctgggcgatttccagcgcgttttcccggccgcgctgctccagccgctggcgcagcaccggcggcgagacggcgagacagatcggcaccagaacctctccgtaacgttcccgggccagcgccaggtgggcgcgggagccgttggccaccacgtcaaagccggcgtgcagccagaggtcgatctccacgccaatgccatagtaagtattgttggcgtgccagctgagagcaaaaagatgctgctcggcgcgggtaaaaaactcatgttcgctgagggcgatatgattctcgctgcccgcgttaaacgggcgggttatgtaacgatgggccaccagcagctgcgggtgctcgcgctggcgcagcgccgccagcaggctatctttaccggagccggaggggcccaccagccaaatcagttttcctggcattaaaagaccctctttccctggcgccagacatggtcgatctggatatgttcgccgcgacggtgcgccagcaccaggtcggcgcgttttccctcggcgatgacgccgcgatcgtcaaggcccagcgcctgcgccggatgctgactgaccagacggatcgcctgtggcagggtgaaggcattgtcctcggcgtcggcgatgcggaaagcggcatccagcaggctggcggggtaatagtcagatgagaggatgtccagcaaaccgtggctcgccagctggtgggcggcgacgttgccggagtgggaaccgccgcgcacgatattcggcgcccccatcaggacgtgcatcccgtgctgacgtgaagcctgcgccgcggccagcgtggtgggaaactcggcgatcacgctccctagctggtgagattcggccacatgcgcctcggtggcgtcgtcgtggctggcgagggcgatacggcgggcgcggcacatggcggcgatggtctggcgattgggctgcgaccaggtggcggccagagccatctgctcggcttcaaaacggtccatttcgtcatgcgtcagatgatatttgccctgataataatcgcggtacttgctgcgatcggcgtactgacgctggcccggcgagtggtccatcagagagaccatgctcaccgactcgcgatcgatcagtttttcaaacagcggcagcgtggtgtgatgcggcagctcgcagcgcaggtgcaggcggtgttcggcgcggttgagaccgcgcttttgcgtctcctccacggcattgaccatcttctccagattctcaagacgatcgccgccatcgcgcacgtcgccaatcgccacggcgtccagcacggtggtgatgccgctggcgaccatcatggcgtcatggctgctcatcgccgagtgggccggccagtctaccttcggccgcggggtaaagaacttgtcgaggttatcggtatgcagctcgataaggcccggcagcagccagccgccttccccatccagcgcctgcggcagccggctctggctttcggcgaaggcgaggatgcgaccgtcatggacttccagcgaaccgtggaccacctcgtcgtcgagaaccagttttacgttattgataatcatgctgtcattcccatagagtgcagtcggtcggcgacctgacggcgtaccccttcgtcatggaaaatccccacgatggccgcgccgcgcgctttggcatcgtggatcaggttgaccacggcagcactgtttttgccatccagtgaggcggtgggttcatcaaggagcaggatcggatagtcgaccgcaaaaccgcgggcgatgttgacccgctgctgctcgccgccggaaaaggtggacggcgcaaggtgccacaggcgttccggaacgttgaggcgggtcaggagctgggcggctttcgcggcgctcgcttcgcgcggcgtcccaagatcgagcagcggctgcatcaccacctccagcgctgaaatgcgcgggatcacccgtagaaactggctgacccagccgatggtggttttgcgcacttccagcaccttgcgtggggtggcggtgaccaggtccacccattcgtcgccgtggcggatatggatatggccgctgtccggcagataattggcgtacagcgaacgcagcagggtcgatttgccgctgccggagtgaccgtggagcaccacgcactccccggcgttaacggtcagcgaggcgtcggccagcaccggcagacgcacgccgtgctgctggtgcagaacaaaggttttatggacgttttcaacgcggatcatgttagctctcacggggttgagttgccgggtggcgcttcgcttacccggcctacgaataacgcacctgtgggccgggtaaggcgcaaccgccacccggcaaaacagcattaattctgcaacaccgacgacaccagcagctgggtgtaaggatggtgcggatcgtcgagcacccggtcggttaagccactctccaccacctggccctgcttcatcaccagcagacggttcgccagcaggcgagcgacgccgagatcgtgggtaacaatcaccaccgccagattcagctccaccgccaggccgcgcagcaggtctagcagccgcgcctgcacggacacatccagcccgccggtgggttcatccataaacaccagcttcggctgggtgaccagattgcgggcgatctgcagacgctgctgcatgccgccggagaaggtggtgggcaggtcgtcgatgcgcgaggggggaatctccacctcctgcagccacttttcggcggtggcgcgaatgttgccgtagtggcgggcgccggtggccatgagccgttcgccgatgttgcccccggcggagacttggcgacgcagaccgtccatcgggtgctgatgcactacgccccattcggtgcgcaacaggcggcggcgttcggcttcgctcatggcgtacagcgagcgctgctggtacagcacctcgccctgctgcggcgtcaggcgggcggagattgccttcagcagggtggttttaccggagccggactcgccgacgatgccgagcacttctcccggccacagctcgagggagacatcgcgaaaacctttatccggggcgtagagatgagtcaggttattcacagcaagtaatggctggttcattttttctgcccctcgctctgctggcggcaatagtcggtatcggagcagacaaacatccgctggccgctgtcatccagtaccacttcgtcgaggtagctgtggcgcgagccgcagatggcgcagggctcatcccactcctgcacggtaaagggatggtcgtcgaaatcgagactctccaccggggtatagggcggcacggcgtagatccgcttttcgcgcccggcgccgaacagctgcagcgccggcatcatgtgcattttcgggttatcgaatttcgggatcggcgaagggtccatcacgtagcggccattgaccttcaccggataggcgtaggtggtggcgatatggccgaagcgggcgatatcttcatacagtttcacctgcatgacgccgtactcttccagggcgtgcatggtgcgggtttcggtttcacgcggctcgataaagcgcagtggctccgggatcggcacctggtagatcaggatctgatcctccaccagcggcgtctccgggatccggtggcgggtctggatcagggtggcgtcttcggtacgctcggtggtggcgacgccggtgacgcgcttaaagaactgacgaatcgacaccgcgttggtggtgtcatccgcgccctggtcaatcaccttcagcacgtcgttctcaccgatgacgctggcggtcagctggatgccgccggtgccccagccgtagggcattggcatttcgcgcccgccgaacggcacctggtagccgggaatcgctaccgctttgagaatagcccggcggatcatgcgcttggtttgctcgtcgaggtaagcaaagttatagccagtcagtgggttagccacgttcgttctcccgttgcaggtgtttcagcagcgccagttcggcctggaaatcgacatagtgcggtagcttcagatgcgagacgaagccggccgcttcgacgttatcggcgtgggccagcacaaactcttcatcctgcgccgggccggcaatctcttcgtcatagtccggcgcctgcagcgcacggtcgaccagcgccatggccatcgctttgcgctcgctcatgccgaaggtcaggccgtagccgcgggtgaagtgcggcggctcctcctgcggggcgacgaagccattaaccatctcgcactcggtcagcagcagctcgccaatattgacgctaaagcccagctcttccgggacgatttccacctgcacgtagccgctgcggatctcgccggcaaacggatggttgcggccatagccgcgctgggtcgaataggccagcgccagcaggtagccttcatcgccgcgcatcagctgctgcaggcgcgaggaacgcgagcaggggtagaccggcggggtgcgggtgatatcgtcgggcggcgtgccgcgatcttcctcggtcttcgccagcccctgctgcgtgagcaggctaaagacgtgcggcgtcggctctgcttcgccatcggcttgctgcacagacggcgcttcgccattggccagcagggtaaaatcgagcaggcggtgggtgtagtcgtaagtggggcccagcagctggccgccgggaatatctttgtacactgcggagatgcggcgttcgaggcgcatctccgcagtgttaatcggttcgctgaccgccagccgcggcagggtggtgcggtaggcgcgcagcaggaagatcgcttcgacgttatcgccgctggcctgcttcagcgccagcgccgccagttcgcggtcggcgatcccgccctcggtcatcacccggtccaccgccaggctgagctggtcgcctatttgttcgacgctcagttcgggaagccgtccatcgccccgtcgtttctgttcctgtaaggcgtgagcggcgcggatcgccttctcgccgcccttgacggcaacgtacatttagcacacctccacgtgggtggtgcgcgggatcgccagcaggcgctcgccgcaggtgaggatcaggtcgatgcccagcgggaacgggtgcgggcgttcggttaattcgtcgatgatgcagtccggcagctgcggcgcgatcattcgctcttcggcaatgcctgccccggtcaggcgcagcatgcgtccgccgctgaggctggcaagctgaacgatcagtgtgacgccggtttccggcgcggtgacggtgccagcggaaaggacgttgagctgctcggcgctgatgccgtcattggcgacggcaaagaccgcctgctgcggctggtccaccagcggcgcgccggtatgaaagcgcagattctgtcccaccagatcgttacgcagggcgctggcgagccagaccggtgtttcatgatcggcaagggtcaacagcaggctggtggaggccacgttcaatggctgccagccgtgctgaagctgctgcagggagacaatcacccccggctcgctcatcgctttcagcaggcgacgaaaactgtgttgggcatcctgcacagccagggtaaaagcgggttgtaaggtcatacgttatctccgcgaaccagggtaaagaagtcgacccggctggcgttgacttcggcgcgtcgggcttcaatgcgcgcgctgcgtagcgcttccagcggggttatcagggtttccattaaggtgtgaaaatggcggggcgactgcagcagggcgtcgatcgccgcgcagcgttcagcgtgcgggcggtcgcggcctaagatccagctgtaaccgagggtaccgtcagccaggcgtaccgctgcgcgggtaagggtggcgtcgccggcaaagaagcggtcgccgataccgcccatgcgggcctggagctgtaccagcccggtttccggggtgcgaatcaattcatattccggcgccagctgcagggactgcatgcgcgccagaaggtcctgcggttcactgtgggccagcacggacatccagcgctggcgggtggcggtatcgaagtgcattcagtgctccatggtaaattcaatcatgtcggcgcgggtcaggctgacggagtactccgctgtgaccgactcgccctcgcggctattgagcgtgcggacgcagagcagcggcgccatattggggatttccagcagcttgctctcttttgcctgcgcgcggcgggcgctgattttggtgcgtacgcgggtcagttcgacgtcgagccgatcgcgtagcagatcgtgcagcgagccgtggctgaaggtctgtagcaccggccagaagcgcaggtcggcgaagtagtggtcgatcaggcacagggcgacgccattgacccggcgcagggtacgcaggtggatcacgttctcgccctcattgatgccaaaggcctcggcgacatgggcgctggcggggcgcagcaccgacagcagcttttcgctggtgggatcgctgccttgttccagcaggttttggctgaagcgcgcctgggcgttaagcgggtagtcgatggggcgcatcagcaccagcacacccacgccctgacggcgctgaacccagccgcgctcaaccagctggtcgatagcccggcgcagggtgtggcggttaacgtcgaagcgtgtcgccagctgctgctcggcgggcagatagtcgccgcagcgatagtgatggcgcagctcctgctcaagtcgggcggcgatttcctgatagcgcgtggggtaactggtcggatgtctggacaggtgcatggtcatcaagcctcacacagcatagacgaggagcttcctcgcgttgtgggccgatcctgaccggtttatgttgcatttcggttaagtgacgatgaccaaaggatgaagagttgatgccaggcggatgacagggcggccgggccgccctgggggcgtcagccttgtttgaccacgttgatcatccaggggacgccaaagcggtcgacgactttgccgaagccgtgggcccagaaggtttcctgccaggccatctcaatgcgcccgccgacagccagcgcgtcgaaccagcgctggccttcagcgacatcgctgggatcgaggacgagggtgaagccggcgtaatgcacatcgggcccgaaggcgctgtcgctcagcatcagctcgccattattgatgcgcaggctggcgtgggcgatagcatcatccgccatcttctggccagacgggcagccgtctgacgcttcctgcgccgggggcggcatttcgccaaaggtcattttaaacatcagctctgcgcccagcgtctgctggtagaaggcgatcgcctcggcgcagttgcccgcaaaggcaaggtagggacttaaggacatggtgaatacctcagtgaccgtaacccgtaaagcgtagtcgcccggcaggcgattgagccagacggcagggcgaaaaggggcgctgaaatatgacggcaggcgacagtgtaaatagcggttgccggcgagggaaataacaggatgcgccgggtgacaaacggccaccaggatatcgggagcggcgacggttatgtgaaaaaataatcgcgccgcctacccgaaattaaatcagttctttttcacaaattccgatttgagcttcatcggaccaaaaccgtcaattttgcagtcaatattgtgatcgccttcgacaagacggatatttttcactttggtgccgattttcagcatcgaagagctgcctttaaccttcagatctttcacgacggtaacgctgtcgccatcggccagtaaattgccattggcatctttaacgatcagaatgtcgctctctttcgtcacctcggcagggttccactcatgggcacattccgggcagatgtacatgccgctatcttcataagtgtaagtcgaatcgcattttgggcagtgtggcagttgcatgacgctcctcatgatgtcgtcgaaaaacaggatgttggtcctttaaacagcggctgatagccgaaagtgggtatgattatagcgcaatcacccacttttgtcgggtgtttttttgctaaaaagtagccgtggtattattccgggaaaaagcgaataaacgctgaaattaaccgcccgaagtagagcaaaatcgacgaaataatttccgcgcgatcggcaggaaatgaacttatttattttccgacactctgtaatgaggcggtaaatttctgtgaagttgatcgcagatataaacactgttagggtaaaaaaggggagcaggtcaatttcatcaagcatcacgatgagccgctccatttattcaccagtagccagagcaggcgtcaacaggttcggttgtacattctgtcagcagacagtgcaggcaaacctgctacgcttgaaatgaggagcacagcaattcaccgctcctgacgcacgatgcgaatggccttgccattcggcgaagaggcgtgcactcaaggcggagtagcagaggaaaaatatgcttaaaaggaaaaaaataaagcccatcacccttaaggatgtgaccatcatcgatgatggtaaactgaaaaaggcgatcaccgcggcctccctgggcaacgcgatggagtggttcgattttggcgtctacggctttgtggcctacgccttaggtaaagtcttcttccccgatgccaacccaagcgtgcagatgattgccgcgctgggtaccttctccgtaccatttttaattcgtccgttaggcggcctgttcttcgggatgctgggcgataaatatggtcggcaaaaaattctcgcgataactatcgtgatcatgtcgataagtactttctgtatcggccttattccgtcgtatgccacgataggtatctgggcaccgatcctgctgctgctgtgtaaaatggcgcaaggcttctcggtcggcggtgaatataccggggcgtcgatcttcgtcgcggaatactctcctgaccgcaagcgcggctttatgggcagctggctggactttggctccatcgccgggtttgtgatgggggccggcgtggtggttctcatctccagcgtggtgggtgaacagaactttctcgactggggttggcgtatcccgttcttcctggcgctaccgttaggtatcattggtctctacctgcgccatgcgctggaagagacgccggcgttccagcagcatgttgacaccatggagcagggcgatcgtgaaggattgcaggacgggccgaaggtctcttttaaagagattgccaccaagcactggcgtagcctgctgacctgtatcggtctggtgatttccaccaacgtgacttactacatgctgctgacctacatgccgagctatctgtcgcataacctgcactactcggaagatcatggggtgctgatcatcatcgctatcatggtcgggatgctgtttgtacagccggttatcggtatgctcagcgaccgtttcggccgtcgcccgtttatcctgattggtagcgtggcgctgtttgccctgtcgatcccggccttcattatgatcaacagcaacgtgactagcctgatcttcgccggcctgctgctgctggcggtggtgctgaactgctttatcggggtgatggcctcctcgctgccagcgatgttcccgacgcacatccgcttcagcgccctggccagcgcctttaacatctcggtgctgattgccggtctgacgccaaccctggcggcgtggctggtggagaccacccaaaacctgatgatgccggcgtactacctgatggttatcgcggtggtgggtatggcgacgggcctgtcgatgaaagagacggctaaccgtccgctgaaaggggcgaccccggcggcgtcggatatccaggaagcgaaagaaatccttggcgagcactacgataacatcgagcaaaaaatcgaagatatcgatcaggagatcgccgatctgcaggcaaaacggtcgcgcctggtgcagcagcatccgcgtatcaacgactaaccgttttcactgctaatcatgccgcctggggaaaccccggcggcattttttatgcctccggcaaggccaggccgtgacgccgctgctggctgagtttacggtactgctgcggcggcatgcccacgtagcgggtaaaggtgctgtagaagcggctgctggagcgaaaaccggcggtaagggcaatatccaggatggtcttgtcggtatcgctcagcagcgcccgcacatgattgatacgcatggcggttatgtactgcttcatggtctgctgcatcacccgctgaaagacccccatcgcgtagttcgggttgagcttcacgtgctcggcaacggcattgacggtcagcgcctggtcgtagtgggcagcgataaactccagcatctggctgacataaaactgcgcgtggcgcgagacgctgttcttgtgggtgcgtgaggttttattgaccagaatcggctgccagccggcgaggctcagccgcttcagcatcagggcgatttcatcgatcgccagctggcgtatctgttcattctcgtggctcagttcctgctgccagcggcgtacttcgaaggcgctcaactgctgcgcggcgagggatttaatcaccatcccatgggtgacgtggttgataagctcccggtccagcggccatgagagaaacagatgcatcggcaggttgaatatcgccatctgctggcaatcgccggggcgggtcagctgatgcggcgtacaggcccagaacagagtgatatagcctttctcaatgcgcaccacttcgttattaatcaaatactccacgtcgccatcgaacggcacgttgacctccacctggccgtgccagtggctggtgggcatggcgtgcggcgggcgcagttcgatatccatacgctgatactcggagtagagcgccagcgggctgcggctctgcttttcgtcgctgctgcacataaagggatcggggggcagagaggtgaagcggtgttccatcgttagcgtattcctgaattgtcagagtggctgcatttttcgccagaactgacgacagcttagcggaagaatcggcccattttctctcctttttgctcaatctgttcccgaaatctcagattttgtggcgcttaatggccgatctgagctttcgggaatgctccggcgggaacagggcagcgcagcggggagcggcgtgccactctgcaagtgttcaatgacctgatggagagtgcgtgatgtctgccccaaaaattacttttatcggcgccggttcgacggtgttcgtcaaaaatattctcggtgatgttttccagcgcccggcgctgaaatcggcgcatatcgcgctgatggatatcgatgaaacccggctggaagagtcgcatatcgtggtgcgcaagctgatggattccgtgggcgcgaacggcgaaatcagttgccaccgcgaccggaaaaccgccctgcagggcgccgattttgtcgtcgttgccttccagattggcggctatgagccctgtaccgtcaccgattttgcagtctgcaagcgccacggcctggagcagaccattgccgatacgctggggccgggaggcattatgcgcgcgctgcgcaccatcccgcacctgtgggctatctgcgacgatatgagcgaggtctgcccggacgccaccatgcttaactacgtcaacccgatggcgatgaacacctgggcgatgtacgcccgctacccgcatatcaagcaggtgggtctgtgccactcggtgcaaggcacagcggaagaactggcgcgcgacctcgatctcgatccggcggatttacgctaccgctgcgcggggattaaccatatggcgttctatctgtcgctggagaaaaagctcgcggacggcagctacgtcagtatctaccccgacctgctacaggcctacgccgacgggcgggcgccgaagccgaacctgcacggcaacccgcgctgcgaaaacatcgtccgctatgaaatgctcaaaaagctgggctactttgtcaccgagtcctcggagcatttcgccgaatacacgccatggtttatcaagccgggccgcgatgaccttctcgctcgctataaagtgccgctggatgaataccctaaacgctgcgtcgagcaactggccaactggcatcaggagctggagagctataagcgcggggagcgcattggggtgaaaccctcccgcgaatatgccagcaccatcatgaacgccatctggaccggcgagccaagcgtggtgtacggcaacgtgcgcaacgataatctcatcgacaacctgcctcagggctgctgtgtggaagtggcctgcctggtggacgccaacggcatccagccgaccaaagtgggcgcgctgccggcgcatctggcggcgctgatgcagaccaatatcaacgtgcagacgctgctcacgcaggcgatcctcaccgaaaatcgcgattacgtctattacgccacgatgatggatccgcacaccgccgcggtgctggggatcgaagagatctacgcgctggtggacgatctgatcgccagccacggcgactggctgccggcctggctgcaccgttaatcctcttatgccgccgggggcaacgaacccggcggtgcctgtcacgctctatcaaacgctgaaggaggcgctggcgacagcgacctggaccctatgagtatttcaatgacaacaaagctcagctacggatttggtgcctttggtaaagatttcgctatcggtatcgtctacatgtacctgatgtattactacaccgatattgttggcttatcggtcggggtggttggcaccttgttcctggtggcaaggatcctcgatgcgatagccgatccgatcatgggatggatcgttaactgtacgcgatcgcgatgggggaagttcaaaccgtggatcctgatcggcacgataaccaactcggtggtgctgtatatgctgttcagcgcccaccacttcagcggcggggcgctgctggcgtgggtgtggctaacctacctgctgtggggcttcacctacaccatcatggatgtgccgttctggtcgttggtgccgaccattaccctcgataaacgcgaacgcgagcagctggtgccttacccgcgctttttcgccagtctggcgggatttgtcacggccggcgtcacgctgccgttcgtcaacgccgtcggcggcgccgatcgcggtttcggttttcagatgttcactctggtgctgatcgccttcttcgtcgtttccaccctcgtcaccctgcgcaacgtgcatgaggtttactcctccgacagtggtgtgagcgaagactccagccacctctcactgcgccagatggtggcgctgatctataaaaacgatcagctggcctgcctgttaggcatggcgctggcctataacacggcggcgaacattatcgctggctttgcgatttactactttacctacgtgattggcagcgcggagatgttcccgtattacatgtcctacgccggggcggcgaatttgctgacgctgatcctgttcccacgactggtaaaagggctgtcgcggcgcattctgtgggcgggtgcttcgatcatgcccgtgctgggctgcggcgtgctgttgctgatggcgctgggcggcgtttacaacatcgcgctgatttcgctggccggggtgctgttgaatatcggcactgcgctgttctgggtgctgcaggttattatggtggccgataccgtcgactatggcgaatatacgatgaatatccgctgcgaaagcatcgcctattccgttcaaacgctggtagtcaaagccggttcggcgtttgcggcctggtttatcgccatcgtgctgggtatcatcggttacgtgccgaatgttgtgcagtcgccccacacgctgctggggatgcaggcgattatgattgcgcttccgacgctcttttttgccctgacgctgtttctctatttccgttattacaaactgaatggcgatatgctgcgacggattcagattcacctgctggataaatatcgccgggtaccggaaaatgacgtcgagccggaacggccgattgtggtacccaatcaggtgtaaaaagcgtgcgaaaaccgctgacgaaagaggggagggatgctctctttttgagcaaaaaacagtgtcttaaaaaaacagaaagagaaaaatttagttctctattttatctcaattatttctctttttgagcgttctggactgtttgtttctccgattgttctcaaataaaactcagaattgtctctttttcgtgctcttgcgctgctttttaactcttgctactctttttgggtcttacatttttctcttatttgtctcagtgatggagcaatgcaatgcgcatttttatcgatgatggttcaaccaatatcaaaatgctgtgggagcaagatggcgaaactttcacccatatcagccccaacagttttaaacgcggctggtctgccaccttcggttcggggaagccttttaactacacggtggatgatgaaaagtactcattcgacctgatcacccccgatgcgctcccaaccaataacattgactggcaatacagcccgttgaactccatcgctgtccatcatgcgctgctgaccagcggtcttgagccgcaggatgttgaaattgtggtcaccctgccgctgaccgaattttatgatgaagatgcgcaatatcgcctcgacaatattgagcgcaagaaaaagagcctgctgcgcgacgttaaactgaataaaggcgtggtgttcaatatcactaaagttaccgtgcgcccggaatcgattccggcgggcattagcctgtgtgatgagctgaaaccgtcgcattcggtgctgattatcgaccttggcggcaccacgctggatatttcaatggtcgccgggcagatgacctcggtttcgcgcatttacggcgacccgaagctgggcgtatcgctggtgaccgacgccgttaagctggcgctggcccgggcgaataccgacacctccagctataacgtcgaccagataatcatcaaccgccacgacgaagaatacctgaccgacaacatcaacgatccggatgcggtttctgaggtgaagaaggtgatcaataacagtatcgaacgtctgaccacgcgtgtcctgacggccatcgatagctttaaaggctattcgcacgcgatcgtcattggcggcggcgcgccgctggttgccgacgccattcgtgaacggatgggtctgcgcgaggatcgtttcgtggtggctgaagagccgcagtttgccctggtgcgtggtctgaaaattattggttaaggagcgtctatgactctggatcgcagaaaagtgctgatttacctgcgcccggatatcagcgccagcgagcgcttcgcggacgcaaaaattgaggcccatcaccgtggcgaccgcggcgatatgtcgcgtaccgcgctgctggcggggctggcgttaggggaagtcgatagccgcttgccgtcgatgctggcggcgctgctggcggaagatactaaaccggaaacgctgcgtaagatgctggcctcgttccttgagatccagccggcctctcccgccccggcagccgcgccaacagccgccccggctaaggcgccggagccgcccgcgccggtgagcgagagcgtctccgcgcgtaatctcgccggttcgttaccggattaagcgctattcccggtttgcgcgacccgggaaactccccggcttgcgctgcgcttagtttgtatgccgggtatggcgtagccgccacccggcatacaggcggctccctggctggggccatgcccggcggcgctactggactgaccccataaagttggatggttcatattaagcggctctcagagcctgggttcggtactctaccggactcaggccttttaatttcaggcttatccgctcgttgttgtagtaatggatatagtcctctacggcttttcttagcgcactgacactcctgaactccctcagataaaaacactccgatttcagggtcccgaagaagttttccatcactgcattatccaggcagtttcctttacgcgacatactctgcgtcatcccatgcgcctttaaacgttcctgatagctcctcatcctgtaatgccagccctgatccgagtgcagcagcggagcatctcccggtctgagcttcgggaacgcaccgtccagcatcgtattcaccatctccatcaccggcctttccgacaggctgtaggcgataacctcccggttaaacagatcgagaactgacgacaggtaaagcttttttccctgtaccgggaactctgtcacatctgttacccatttttcgttggcttttgacgcaccgaagttccggctcaggatattgggcgcggcctcgcccgttctccctttccaggcacgatattttttcgcccttatcacagaccggagtgacagttctgccatcagccgctgcactgttttatggtttatccgcagcccctgttttctcagtgcgagcgtgatcctgcggtagccataacgacctttgtgatagtggtatatcttcctgatgttctctttaagacccgcatacctgtccccttgcttcagtgcattcatattgtaataccacgtgctacgggacataccggccgcccgcagaaggtcccgcagagcgtgttcatgccttagttcactgattatcagggctttttgccatttttttcgctctgaaccaaggctttcaacttttttagataggcattctctgcccgcagataacgcagttcggccctgagttcttcgggggagagtttttccagctctttatctgttagtggtgggatattttttggctttgtcatttttccgggccgtccgcattgtatgtttaaaagaccttccgctccggcatcgttgtacacgtcgagccagcgccggacaagtatttctgcggagagattaaaccgggcagccgcttcacgcatcgtcaggcggtcactgataaccgcccggacgaccacgagtttaaattcatcggaataatgattattttttgcagtcaggccttctgcaccgtggaactgccatgccctgacccagcgacggacagatgttctttcaataccaaaaaggtcggctgtactctgttctccgtctttaccggacaaataatgattaaccacagccagttttgtttcaggggaatactttggtttagccataaaattgcaccttactcagttgggtgtccaacttttggggtgcagtccatacgcttgcgcgggcctacggatccagtgtaatggtgggtccagtgccatttgtaggccgggtaaggcgtagccgccacccggcgcgaagacggaacgccacgacccggaatgtcggccctatccgtgggcgaggaagcgcgccaggcgctgctgcagcaggcgattttcgcgggtcagccgcgcgttctcatccagcagggtcagcgccaccgcaattcccggccagtccagctccagctcgttacgcaggcgtaccgcgcgatgcacgatcgtcaccgcgctgtcgtcgaacagccaggtgtccgcctgcggctggtgtggctcaatcatccctaagccgacgatctccgtcagctcctcttccgacaccccggtacgcaggcacaattcggtaatggtaaacgtcactgttactgtagccatcaggctttcccccatgtcttacgcggatcgaagctggcttcggcggcggccaattgttgccagagctcacgcgctttttcatctggttttggcggcatcactattttaataacggcgaacaaatcgccggtgtgggttttgctcacgagtcctttccctttgatacgcagtcgctgccctgcctgactgcccggtggcaccgtcagcagaatgctctctttcagggtgggcaccgtcactttcgcgcccagcgcggcctcccatggcgccagcggcaggacgatctccaggttatgaccgacaatatcgaatagcggatgcggggcgatgtggataaccagccacagatcgccgttcgggccgccattctcccccggcgtcccctggcctttcaggcggatacgctgaccatcgactaccccggcggggatcttcacattcagcgttttcggcgtttcgctttcgatcatgccaaacacgttgtacaccggcaggttatagctgatggtgcgcgtctgctcggccagcgtctcttcaaggaacaccgccacttcgatctccagatcgtggccgcgcgccgcgtgttgacgacgacgctgatgcgcctgctggccaaacatggaggagaagatgtcgtcgaaatcttgctgactgtagctctgctcgtgggtctgtcgctggcgaccgaagccgggatcgttgcgatgctgccagagctgatcgtattcggcgcgccgttgctcatctttcaggacttcccaggcttcggcgagatccttaaatttggcttcggcatcgttttctttactgacgtcggggtgatatttgcgcgccaggcggcggtaggcggtcttgatggttttcagatcgtcggttggttgcaccccgagaatggcataataatccttcaattccatgattttttctcatctatgctcagtgcggtggttacatattccctggaacaggcgtcagtataaagcgtagggcaaatgcgccctgacggggaagaaaagtggcggaaacttgacgccgtcggggtcgacggcgccgtggataagattagtccttcgcctgcggccgtgggcggcggcgccatccggtgaatagcaccagcagcgcgccgacggcgccagccaggcgcgcggtgccctcgccggcgctgggaaacagctggcgaatggtagggtcgctgaccagcattgacccggcaatccagccgatgagcatcccgcccagcagcaccaccgtgggaaagcgggtgagcaggaccagcaccagcttgctgccggcgacaataaccggaatgctgatcgccacgccgagggcgaccagcgcaatgtgccctttccccgcagcagctaccgccagtacgttatccagcgacataatcacatcggcaacggtgatggtgatcgcggtgcgccacaggctgccagagctgctaacctcgctctcttcttcctcattcctgaccagcttgatgccaatccacagcaggagcagcgcgccgactattttcagccacggcagcgacaggagatacaaagcgatcgccagcagcagaacgcgcgccaggatggcgcccacggtaccgatgatgatcgctttggtgcgtttctgcggcggcagtttgcggcaggccatggcgatcaccacggcattgtcgccacccagcagtaagtcgatggcgacaatctgcagcataatcactgccatgtcccattgttgaagaaatgcatacatatcgagagaaaccacctgaaaaaagagcaagaaaaaccgctgcgcagggtactccgcctgggccgcgttgaccactggcgcagacctgcgctatcgcgcgggaaagagagagcctgaaaaataaagttacgaatcaaggcgccgttgggcaaggcttcggcgaaaaagggtgatattttgtcacccagactcacctgccgttcacttatcgcaaggatccccactatgtctggccacaagaaatacctctctgtcgccctgctgagcgctgtcttactgccggcgatggcctctgccgctgacgcgccggcgactttcaccccggaacaggaggcgaaaatcggcaaaatcgccgccgactatctggtcgcccacccggaagtcctgctgcaggcgagccagaaactgcagcaaattcaggctgagcagcaggccagcgcggccactcaggcggtgctgaagaacgccgccgtgttgacccaggataaaaataccccgacctacggcccggccaacggcaaagtcacggtgatcgaattcttcgactaccagtgcgtctactgcagccgtctggcgccggtgatggagcaggtgattaaagcgcacccgcagacccgcttcgccttcaaagagtggccgattttcggcggccgctgggaaagctcgctggaggcggcaaaaaccggcctgcagatctatcaacagaaaggggcggatgcctatctggcctaccataacgggatttacgctaccggccataacgaaggcaagctgacgacggcggatatccagcagcaggcgaagaaagccggctttgatgcgaagaaggccgccgacgtcgaaccggtgctgcagagcattaacgatctggcgcaggagattggtctgagcggcacgccgggcgtgatcgtgatgccgaccaccggcgccacggaagccagcatcaccgtcttcccggggctggcagacaaagcctcgctggaagccgccatcaaaaaagccggcggctaatccccggcgtattacctgtccaggccgccgacggcggccttgctctcatgcgtcatcgctctcttcctgcggcggcggtaacgcgtggctttttaaatcaataatctgcccgatttgatcgtggtaaacggtgagcaaattatagcggctcatctccgagataatctgcggcgcgacgttaaagctgctcgccagctcatcgtcgcgcagagcgagcaccgcggtatgacgccgggtatgggcgcggcgccggttgtagtgataccagaggatcaacagccagccgttcagcgcggcaatcagcagatacaccagcgccgtattcagggagtccatcagcgattcccagcgcggagagggcggcgcgatgaactgcatcagcaaattggcgtacagaaagaacagaaaaccgagccaggccagcagcgttaagccggcgtcgaccagccggggcagcacccgatgttcggttaagatgagcgtattttcattcatcacaggcttccttttccccggtccggactcacccagcgcgcgcgggaacgttgacgtttcaccatcactttcggaaaagcgaccagcgtggtcagcaggccgatcatccagtagaccatcgggaaccagatcacccagaacagcgatttggcgacctttttctcatagcgccgctcgatatacaggctggcgacgaactgcagcaggcacatcaggccgagcagcatgccggtgaattccggtggaaacaggctatgcaccgccagattgtcaggcagcggcatcaggcggctgaggataaacagcagaatggtgatcgcgtaggcaaaggcccacagcgtggagcaggcatactccagaaacagcggccacatccggtgatgctgccagtgaaacaggcggcgcagattgaccagaaagacttcggcgccgccctgggcccagcgcagacgctgcttccataaccctttgagggtctccggcatcaggatccagcacagcgctcgcggctcgaaaaagatgtcccagtggcggagctgaagcttccagctgatatcaatatcttcagtgatcatatccgggctccagtagccgacgtccgccagcgcctggcgccggaaggcggcgattacgccggagacggtaaagacccggccatagatccgctgcgtccgtttgataagcccaatgatcgacgagaactccccaacctgaatgcggccgatcagcgtggatcgggtgcggatccgcggattgccggtgaccgccccgacgtgcggataatggatcaacggcgcgaccagccaggccgcggtatcccggtccagcagggcgtcgccatcgatgcagaccagcagatcgccgcgggcggcggcggcgcccgctttgagcgccaccgcttttccctgattggcggccagatggatcacccgcagcctcggctcctcctgcgccagctgctggagcacctgggcggtgttgtccgaagagccgtcgttaatcgcgatcacttcaagattggcgtaacgctgggccagcgctgcgctgatggtttcccgggcgtttttctcctcgttaaagcaggggatcaggatcgagatcagtggattgcccggcagcgtcggcggcggggtatcctccccccacggccagtgacgttccagctgaaaccagaagtagagacccccggtgatccacaacactgacataaacagcggccagaaaaagacaaagtcgaggataagctcgccggtaaataccgctgcgacacctaacggcagcccgaatacgaggcataaaatgcacaatgcgataatgcgatcagtcatggtcagggtaccaccaggaagaaaattgcggcctgatacgagagatatcaggctggttgttaataaaatcgtcagggtagtagccgtagtttttgacgccgttcagccgcagcaaacgcatccagtccgccagctgctggtcgggaatggcgttttgctggcgtcgattccagtctctggcctgcagttcaaagatggttttcttcagcgcgcccgggtggcgggcgacggcctgcaccagccgcgtcagccaggcctggctggcgtcgatcggcacggactccatcagcggcatcgccatggggaccgtccagtcataggcggcaaggaagtcatccagattctgcgcaaaccaggcttcgctttgcggctccaggatcggcagggcgaagagattacgcgccgttttcacctgcgggccgcggatggcctgcactgcctggcgtagatccagagtgaagcgggtcagggtttggcttttgaaacgcatccatgcctggcgctcttgcggacgttggggcaccggggcggcatcgtgcgccatacccgtctgccgccaggcggcgaccgcctccgggctcacgtcttcaaaatcggtcaacacggcgtcgtcgtgaaacagaatcccgctgaagctggcgtgtcgggccagatcttcgtagatgtcggtgatctgctggcgaacccggggatcccagggcgacagacggacgtacggctggcgggcaagtaacgccttcccggtttgcggatcccagcgctgaacgcgcggcagatctgaggcaagatcgaaggccagcaccggcatccaggcataaaccttcacattgccgcgggtctgcaactgccaggagacgaagttaaacaggtcggcgcgcatcggcagccagcggttggggaaatagagcgacttgaccgtgccgtcgccctgcgggtcggagaaggcctgcagaaagacgtggctgattttcatgtcatagacgcgctgcaccagcttatcgatattctttgcctgctggacgggattggggtcatagacatagtccagatccacatgcatcacccgaacaggatcggcttcctgaatctgggtcacggcgctggcaaaggccttgagcgacgggttaccggcgatcagcaggcgtggaatattgtccagatccttcacgttgcccaggccgtcgttcagcgtaaacgccagctgatacccttgctgtttggcgatagtcagggtgctgccgctggcggcgccgtagggccacacccaggcgcgcggcgttttcccggcaacctcatggattttcgccgtcactttctgcacgtcatctgtcattcgccgggtaaactgcgcgtcgctttcatagcggccggtggttttatcccagccgcggttggcggcggcaggctcgcggctgccctgcggattggccggcagaccgtagtgcgaggcccaggtgtgagcgccgatctccaccagcggcgagcggctgagctcgcgcaccatctcccaggtagcgaagcgctcgcgcggcgtcatcaggccgccaaaattaacgggctgaccagcgggagtgtccacccagctgcccaccggtgcccacagcgccgggacgttccaggctttaagcagcggccatacgcgggtgtaaaagctgctgtaaccatcgtcaaaactgaggagaaaagccttgggcggcagcgactttaagccataatgcgcatcgagaatgtcctgaacgctaatcgcatggtagccgttatgcagcagccaggcgatctgctcattgagtgcgctggtgcgcaccgaaagataacgctggtcggcggcatcgtcttcgacgtcatggtaggccagcaccagaaagcgatccgccggccagggttgattggcctccagttgggggcgctgctgcggggcgaggaaggggacttcctcagcacgcacgctgaagataaggcacagccagatgagaagcatcgggccgttgcgcagggtcgtgttcagcatggtcatccttaaaaccgtatatttgcatcaagagtgatggcgaggttgttttcacgtttgccgtcgtaggggcgcttatcccagttcagcatcagcccggtgtcgacgacgttgttccagcgcaggcgctgcccgtaacccagcaccgtgatcgccccggcggcgtgatttttttgccagtagctgccgccgccggccagtaactgctggctccagacggtgtcatagcgctggtaaagcgtgtgatcgacggccagcgccgcggtggcggcgaggtcccgtgccggactgtagtaggcggtgtcggtgcggctattggcgctggccgacagaccgggctgcaaatccagcgttaaccatggggtttgccagaggcgttctttaccggagagggtgtactcctggcggcggttgcgatcggtaaaccggctggcggccgcgctgaagcggtactcccggcgttcgtttggagaccagcgcagccagccttcgccgcggttggcgctgacgccgttgcgtaacgcgcgcagcggcgtctgctgcgaaatccgctccagttcgccgcccagctgccagcgatcgctaacgtcatgggcggcggaaaggcggacgccgggcttgttctcgtcgtgaaaattgacgctggagagctcaagctcgccccagtagtcgcgcggacgccattcaataccggcaaacagctggcgacggctgcctttcccctcttcaaaattgccttcagcgaagcggtgcccgccgaacaaccgccagctgtcggctagcggcgggctgtagatcgccgtctcaaaactgaggtcgtgcgtgccgctcaccgggttgtcggaatgcagccctttgccaacgctcaggcgcagctcggagagatgatggatctcgcgcgctctggccaggcgctgggtgttcagatcccgtggcgagcgggcgacgacgtcgtcagccagcagatccatttgccgccactcctgcagatcgagggcgacccaggcctgctggcgctccagctgcaggctggcgggttccagagattccgccgcttttagctggcgttcggctgcccgtggcaatcctctctcctgcagaagggcggcatagtctatctgcaggccctggtttccaggggccgtcgccgccaggcgctgcattcgggcttcggcctgcggcaggtcgttggtagccgctaaatagtgcacgttaagcgactgtgcggtgagccagtcgtcgttcggctgcggcgttggcgagccgtagagacgacggatgtagggcgcattcctggtgaggcgggcaacataccgttgcgccgccgggtactgaccggtgtccagcagagcgtagaaaagctcgtgttcctcattctgttggcttgtcagccacgaaggatgctggtggataagcgtcagcgcaggctcaatttgcttaagggcgataaaagaggagatgacccagccgatggcccagtcgggaacggtctgctgctgggcgatcaggctttggtattcgcggatgacctgcgcgtactcggcgctggcgtacagcgcgcccagacgatcaatacgcgcccggatgatgtcgggcgcagcctgtgggtcggggtgccaggcggcgatcatcgcgtcatactgcgtgagcgccgtgcgggccagcgcgtaacgcgccttttcttcgcgggaaggggtatcggcaaggcgcaccagttcggcggcggcgttcaactgcaagttacgcttttccgcaggcgtcagttcgacgctattcgccaggccgagagcaggggaatcaatccggttgcgggtcagggtcgccatcaggctggccagcgcggttttgttttgcggttcacgatcgaggatctgcgtgtccaccaacagctggtcccagcttttgcccagccgcaggtagacataggagagcgtctgcaggtgcgcaacgctcgcctgctccgccaccaggcgacgagcttcgctgagcgcctcgccgtccttgcgggcatcggcgagcgttttgatatagccgatacgatagtcgtcgctgccaggggcctggctgagtgcctgctgccagagggtgagcgaggtttgccactgcttctggttgcgcagggcctgcgccgcggcggcggtgccccgtgcgggaagcggcatatagacctggtagcgtcgccagactttcaccacttcatcgtcctgaccggcccagagggccacctgcagccagtccgccacctgagaaggggttaaggcatgccgcagctggtactgctgaaggtaactgagaaagggggcgtactgaccttggcgcgcttgcaagatttgctggtcatagagtgaatccgctccctgaaccagcgccgggaagagcaaaagcaagccgattgatagcgagagtttcgtgttgcgattaaacaataacgtatttgaataaggtgatctttccatttctatttgccatatgttcatcaagaatccattgcacaacacgaccgtcctttgacggtgagttaaaggatgaggatggtcccatttagctgactggcactgcaggtgaatgacctattgcaaactaataaacatatctcctgttgatgaatgaatgggtaatttatacccgatacggcaaccgataaatatggataaattatggtctgcgttttaagataattctgtaaaatcgacttcattcgaacggaagtgttcaagttgatttctttaacctactgatataaataaaaaagaaagtcaggtggaattttgtttcaaaatggcggtgtggcttatatttagttggggttagagttttttaggcaatatttaagatgatttctgacaaaaattctcaatagcaaaaaaagcatcttttctgtggattttttggtaatgactccaatttactgatagtgttttatgttcagatagtgcccgatgactttgtcatgcagctccaccgattttgagaacgacagggacttcctgcccagccttgccagatgctgtctcagattcaggttgtgtcgctcaattcgctgcgtgtaacgcttactgatgacgtgcagttttcccttcagacgtgactcatacatcggccagccgtccgtcatccataccaccacgtcaaaaactgacagcaggctcagaagacgctccagtgtggccatagtgcgttcaccgaaaacgtgggctaccaccgccctgcgtatcctgtcatacgcgtaaaacagccagcgctgacgtgattttgcaccgacgtagccccattgctcgtccatctccgcacagacaatgacatcactgcccggctgtatccgggaggttactgactgcggcctgagttttttaaatggcgcaaaatggtgttgaggcccacgcccattagtcgtgcggtggcacggcaaccgacgccgttcatagccatatcaatgattttctggtgtgtaccgggctgagaagcggcataagtgaaggtgagctgccatgttttacggcagtgagagcagagataacgttgatgcccggcagtacttttgccattacgcatcacgccttcagtagcggaacaggagggacagcagacggagactgaagccacgggagcacctcaaaaacaccattatacactaaatcagcaagttggtagcatcaccgattttttttatttataatcaatctgtttatttcctgtcagaacgcaaggagggttttcacagccagattcagatgccgcgctaatgataaatcacaggtctcgttattttcaccgccatgcgaagcgttccatagggggagggaaaacgtctggttgacgagaatttgttgattaaatgttaaagggacgatttgtggcaactttaatgatattggttacccaggattactatctttttcaaggtgttaagaatttttttcctgatatcattcagttagattctagcggaaaagcgattttagataatgaggttgatgaagtctctctgctggttgatagccgctcgccgctttgccattacgattatctcgtgctggcagcggcgaaatccagaaagcgaatatgttgtatcgtcctcgatatgcgccatcgggaagagcatttactgagcctgaaatcgtttttaaacatgtcattatcacccgcggatatggcgacattatttggcctttttctggagatgaatagcaagcgtctgaccaaagagtggtttgacgatctgcgcttaagtttgtctgaacagttaatgttacgtttactcatggcggggatgaccatggaggaggtggccgtcaatctcaatacgtcactaaaaagcctttaccgcaagcgtactgcgctttatgagcggttggggttagataattttaatgaagcttgcttatttatctttcgaaataagctgctggagcagaccgaacgttcgttatgaagcttcgctgtacagagaatggatgttatcgcaaggtatttgttgacgaaaatataataaattaaatagatattgataggtacaaccgtcgatacccggcggtatcgatgatggcattcggcatataattctggagctctttggaagtatttaccgccaatgcggtttgctatgcacagcgattattataatgaatatattccttgcgccgcacaggaatagttttgtcataaattaacactaccatggtattccgactcacgcgtcggaataccatgagatatcgtgaaagcatcagaggagcgaggtggatgagaataagggacagtattgctgagcgattagaggcatgcgggctctaccgtcgggcggcatccagatggattgaggtgatgcagcgttgtctggacgatgaggaccgagagtggatccgtcaccatcgcaatcagtgtctgaaaaaggcgcaacgtccgccggcgccgaaagaggagtttgccgacctccaccaggcggcgaaagagactcaatatcgtatgggcattgcgaagccctatggcgaagcattcaggctgcccggcaaagggaaaacggccgccgagtaatgcctttcttcacgacgtttgcctgacggcttcgccttatccggcctgcgggtcctccacaggttcaaacagcgtaggcccgcgcaagcgcagcgccgccgggcgatacacatcagacaccgtacccgcggttgtgccggatggcggcataaatgccttatccggcctacgggtcccccacaggttcaaacagcgccggcccgcgcaagcgcagcgccgccgggtgatacacatcagacgccgtacctgcggttgtgccggatggcggcataaatgccttatccggcctacgagtcctctgctggttcaaacagcgtaggcccgcgcaagcgcagcgccgccgggcagcgggtgatagaacggagttcgatgaagagtccggatgcagaaaagcaaaaacccgccttttaggcgggttctttaaatagtggtgcccggactcggactaacgccgcaggcgttgaacagcgcgcttgccgcgctggccccgaaggggtgagccgctgtgcggcgaataatcgaacggagttcgatgaagagtccggatgcagaaaagcaaaaacccgccttttgggcgggttctttaaatagtggtgcccggactcggaatcgaaccaaggacacggggattttcaatcccctgctctaccgactgagctatccgggcaacggggcgcattaaaccgtaatccgcccaccccgtcaaccaaatttcttaaattacttatcgattgcttatctttgcggcaattctgcgttcaaaggcgcgttttggcttaacttcactgcatgccgttatcgccctcgcggcttttccagccgctggtaatggcgataacgtggcgtagtccggagatgagataatcgccaatgacctcctcgtcctcacgcggcgagctcagggtaatttccgcatccacgccgtggcgataggcgccatgatggctgaaaatggtgccgatataacacttcccgttcagccagaccggaatataggccaccgtctcatagatatagttaacggcgacgccgctgtagtagttatccgcctcgtcagcggaggtgcccggcgggatggggcagatcggcgcgtcgttgtcgctggcgggtctgtctttcagcaggctgccctgcattacctccagcgagcgcagcaggtccgctttatcgccgtcgctcaggctgggggtcagcggctggtctttctccggggagcggatgctgttcagcgtatagcgatagcgaaccgtcaccgcgggcgtctggctggtggtgctgaacgggcgtagcaggtagaggttatcttcgccaaactggccgttgtaccacagggcatacacctggccgttgattttgacccagtggttccactggttagccccgcggccattaatggaaaagagggcgccgggcaccccggcatcgaaatcatcaccattatcactgtcgctgccgttgacggcggcaaaatcatcatcacctcgcttgagcaccccggtgtagctgaagagcccggtgccgcccacatagctgtcgataatcaggtcgcgtttgccgtcgccgtcgaggtcgataagggtaaagctgactttgccgttttctgaatccgcgctaatcgaggagcgcagaaacgcctgccactcatcatcgctgatatccggggacggtttactggtcgtgatcagcgtatcgtcggcgtaagtgagcgtgaagtcggtaatatggccggttaacggaaactgctcggcgaccttattcagagacaattctggatcgcttttttgcgctttcaacactgcgttatacaacgtgcgcagagccaggttatccgcctctttctgctgcctggggatcacctggctgacaaaggtcggcagcatccaagtgccacccggggtaatttcccgacacataccggtgctgtacttcaggctgggggtaaaggttttaccatcccaaacgcgcgtctcgccggtgacgcagtcggccatgccccgttctttgtgcaaaaagacgatagcgccgtcggcgtagctggaggcctcggtagtgagcagccgcggtttgctcaactgggcgttatcgaccagccacagggcataaccgtcgttatagggcgctcgccagcagagcgcctgcgccagagaatgggttttatccagcgcggtcagcgtgatctggcgatctgccgccggaatggcctgattctgccagtcgtcgcagcgctggttcagcagcggcgtcaggatgggcagcagtttctggcgctgaagcatactcaacggcactggctgcgcgttatggagaaccggggcggcgataatttccggggcgggagtggctggcaaaatggcatcgtcgccggcatcgcctttatccagcagcgcatcggcggtgccggtgcgtcgctgaaacgcatccattttacccagcacctcgcggctgccggcgctggaaagcggcaggtgctggccgttaagggtgaattcgattttgcgctgattcgttaacgcctgtagcagggcggtggtctgatcgctgtcgaggcgaaagtggctgtcgtcgagagcgtccagcgcgccaaaatcccggtcgtcgatcagcaggctggcggtggagtcggcggggatatcgtgctcgatttgcgcaaaggttaccgtggcggtgaggtgctgttcgctgcccgcgttgcgggtcaacagcacgctgacctcacccatgcggacgccgtaacccgccgcccggcaggcgccggtattatcgcaggcgagctcccagtctttttgtgcaaaggaaaaaccttgcaggggagccgccagcaggggcgtagagcagaggcccagccaggcagcccagaagaacgcgcgcatatcaatccctgtcagcaatcagtgagggggaaattataggcgcgacgtggcggttaggatatcagaatcaggtcaaggcgccgcccatacggcactgggcgaagcgtagaatatcttcagccagccgccgggcggtatccacatccgtctggctacgtttgaccagcagacggctcagacagccctcgacaatcagctccatctgcttggcgaccatttccgggtcatccacctccagctgagtcagcagctcgtgagtgtaggccagcgaagcctgcttctgctgttccgccagctggtgaatggggtgctgaggatccgggtagaaggtgcaggcggcgataaacaggcagcccgggtaccgctggttgcttacgcaggtggtgagtgcggcatagcgtgccagcagcttttgctctgcgcttaaggtctcgtccagcaggagctgacgacgccaggcatccacctgctggctcagatagcgaagcgcgtcgtacagcagcgcttcgcggtcaggccagaagcgtttcaggtcgctcgtcgggcaggacacgcgctcagcgaccatctccagcgacgtgttggcgataccttcaatttcaagaatcttaatggcttctgccaggacgtcttcacgtagcacggtgttctcctccatctttcctcctaaagtgtcgctcacgcttgccaatcgcgcaaatgggcgctgaatgccgcggcatccataaagccggtgactcgccgctcaggctgttcctgaccctcagcgttgaagaacaggatcgtcggcagacccagcacctgcaggtgtctcagcagcgcgacgtcttgcgggctgttcttcgtcacatcaacctgtaataacacggtgcctttcagcgcctgctgcacgtcaggtgaactaaaggtgtatttttcaaactctttgcaggccacgcaccagtcggcgtagagatcgagcatcaccggttgacctttcgcctgcgccagcgcctggtcaagctcggccaccgagctgacgcgggtgaaggccaggtgcgcctgctgctcgaccgccggggcgccaaacgcccagtcctgcagaggccgcgcgctgaccagcgcggcggcaagcagaatgatctgtaccagccgcatccacggccgggtagcgcccagcgaggtgataaacgcccagctgaagaaggcgacaccgagcattgaccacagccgtaacccccactggtcgccgaatatgcgttccagcaggaagacgggcagggcaaggatcacaaacccgaaggcggttttcacatggctcatccacgggccgcttttcggcagcaggcgattgccaaacacggtcacaaggatcaacggcagacccatgcccagcgcgtaaaggtacagcgtgccgccgcccagccacagattaccgctctgggcgatatacaacagaatggcgcttagcggcgcggtagtgcagggggagcagatcagcccggcaatagcgcccatcgcaaagaccccgccgggcgagccgccctggcgcttattgctgagcagcgtcagccgggtctgcagcgacgacggcagctgcagcgtgaacaggccgaacatggagagcgccagcagtataaacaccgccgacaggccgaccaggacatatgggtgctgcagggccgcctggaactgcagcccggcggcggctaccaccaaccccagcgcggtataggtcagggccatcccctggacgtaaataaaggccagcagcagggcgcgcgcggtggaaagccgctgttttccgcccagcacgatgcccgaaatcagcgggtacatcggcagcacgcagggggtgaaggcgataccaatgccaatcagcagcgcccacagggcggtgaagggcagacgagcggggacgtctgctggcggcgccatggcaggcgcctgcggcacggcgttctcctccatcgggcgcggttcaaccggcagcggcggattgaaggccggacgatggttcagcgacgacacgggcgcggcggcggttggctgagcgtcgtttgaggccgcccgcacggcgctcagcgggatcactttagtctccggcggataacagaatccggcatcggcgcagccctgccaggtgacggtgagagtagcctctttgtccgcctccttcaccgtcaccggcacggtcaggcgttggcgaaagatctcgcttttgccgtaaaactcatcttcatgccactctcccgccggcagcgccggttcgtcgatcgtcgccccggcggcgctgaaggtaaactgttgacgataaagataataaccatccttgatttgccagctcaggttgacgtcatgctgttgctgctgaaagtcaaaggcgaaagcttgatcagcaggcacgaagttcgagcgccccggcgcgtcgaataacccggcggtggctgatgtgctgcacagcagcaggatcagcgtaatgatgcggtaagccatgagaggtaatcgttgtctccatgcgtgacgggtagaaccagcagttctggggtttgatacgggtggtgtgacttcaggcagtccagcagcgcctgctgatgggcaaggtcagttttgagtagcatctgcacttcatactcctgctcgagtttcccttcccagtaatacagagaggtagcccccggcagcagcgtggcgcaggctgccaccttttccgccagcgcttttgccgccagatcctgggcggtcgcttcgtccggcgcggtacagagcacaacaacagcatcaggcgtagtcatcatgaacctcgtatcagcgaaaagaggcactataacacgcaagatgcggggatattaacgtaacgagcggggaaagtgagggcaacggaaggcgggcccgtagtgggcccgccgccagcggtatttacagcataatcccgccaaagataaagccgaggatcacgcacagcgtgatagcgataacgccggggatcaggaaggcgtggttaaagacatatttaccaatgcgggttgagccggtgtcgtccatctctaccgccgccagcagggttgggtaggtcggcagaacgaacagcgccgagaccgcggcaaacgaggcgatagccgtcagcgggctgacgcccagcagcagcgcggcaggcatcaacgccttggtggtggctgcctgcgagtagagcagcgtggcggcgaaaaacagtaccaccgccagcagccatgggtaattgtgcagcagatcgccggccacggcctggatgtcgctgatatgcgctttaacgaaggtatctcccagccaggcgacgccgaggacgcagacgcaggcgctcatcccggacttaaaggtgctggcgttgagcacttcgccggtgtcgattttacaggtgatgctaatcagggtggcgatggtcagcataaataccacgatcgcctcgttacgcggcagcaccgggttcttaatcaggccgacggtatcgctgatggccgtggcgtagaacatcaccgccacgatgccgatcaaaaacagcagaacggaacgtttggcgtgcggctgcagctcaaatacctggctgccgcgcagtctgacttcccccttggccagccgctcctggtaaaccggatcgtctttcagttcgcagccgaggaagttgcagacgatagcggtgagcatcaccgccagcagcgtgaccggaatacagatggccagcagcgtcaaatagctaacgcccagcggttcaaggataccagcgaaaaagaccactgcggcggaaatgggcgaggcggtgatcgctatctgggaggccaccaccgcaatcgacagtggacgagacggacgaatgccttgctctttggcaacttcggtgatcaccggcagcgtggagaaggcggtatggccggtgccagcgagcacggtcataaaccaggtcaccagcggggcaaggaaggtaatgtacttcgggtggcggcgcagcatccgttcggcgaggctgaccaggtaatccatcccgccggcgacctgcatggcggcgatagcggcaatcaccgccataatgatttcaataacgtcgaaggggatcgcacccggtttaatttgaaaaataagcgtcaggacaaggacgccaaggccaccggcaaagccgataccgatgccgccgagccgggcgccgagataaatcgccagcaggacaataaccagttctgcaccaaacatatatgccttccttgttttttaacaagttgatattgaattgttgtattttagtaaaaccaaaaagcaaaaaaggcatgtcatcgctgacatgcctttgaatgactaacctgaaagattactgttcgctttcatcggtataacgctttgctttataagcgggatgcatcaggttttgcgcagagaaaatatcatccaactccgccgccgtcagcagtccgcgctccagcaccacttcccgtacgctcttgccggtttcggcacagatcttgccgacgatatcgccattgtggtggccgataaacgggttgaggtaggtgacgatgccgatggagttgtagacgtagccttcacataccgctttattggcggtgatgccgttaacgcatttctccagcaggttgtagcaggcgttggtcaggatatgaatcgactcgaacatcgcctggccgattaccggctccatcacgttcaactgcagctgaccggcttcggaggccatggtcacagtggtatcgttgccgataactttgaagcagacctggttgaccacctccggcaccaccgggttaaccttcgccggcatgattgaagagccagcctgcagctcaggcaggttgatttcgttgaggcccgcgcgcggaccggaagagagcaggcgcaggtcgttacagatcttggaaagtttcaccgccaggcgtttcagcgagctgtgaaccataacgtacgctccgcagtccgaggtggcttcaatcagatcttccgccgggacgaccggtaagttgcttacttcagccagcttctgcaccgccagctgttgatagccgtccggggtgttgaggcgagtaccaatggcggtggcgccgaggttcacctccagcagcagctccgcagtgcgcagaatgcttttggtctcttcattaagcagcacattgaaggcatggaactcctggccgagggtcatcggcaccgcgtcctgcagctgggtgcggcccattttgaggatgtcctggaactccacggctttcgcctggaagccttcgcccagctgtttaatcgcatcgattaacttaaggatggaggcatacaccgcaatgcggaacccggtggggtaagcatcgttggtggactggcatttgttgacgtgatcgtttgggttcaggtactggtattcgcctttctggtggcccatcagctcaaggccaatgttcgccaggacttcgttggtgttcatgtttacggaggtaccggccccgccctggaagacatcgaccgggaactggtccatgcatttgccgttattcaggacttcgtcacaggcggcgataatcgcatttgccgcgcttttgggaatggtctgcagctccttgttcgccagcgcggcggctttcttaaccatgaccatgccgcgcacgaattctggtatgtcgctgattttgctgttgctaatgtagaagttttcaatcgctcgcagagtatgaacgccgtagtaagcgtccgcgggaacttccctggtgcccaacagatcttcttcgatacgaatgttgtttaacatgtgaaccttcttttcaagctgccaatgaattcaccaaacacacagaatatccagtattcagtatattttctggccgacgattatttccttaaccggcccggtgcccaagatcatatgctgatgatagcgaatatcagtaagcttgatcacttattacattgcgggtatgagaagatttattaatctgtgaaatgggtcaccgctttcttattcctgagaaaaataagcctttccgctgattgaaaagccgctcagcatccccatgttagtgggatgcgatcagcaaattgatgattacgggcgctgaacgcagcgcccgttgatgaaggagacgccggtgcgttggattccgtttattgccttttttctttacgtttacattgagatatcgatctttatccaggttgcgcacgtgctgggcgtctttatgaccctgatcctggtgatctttagctcggtggtagggatgtcgctggtgcgtaaccagggcttcaaaaacttcctgctgatgcagcagaagatggccgcgggcgagagcccggcggcggagatgatcaagagcgtatcgctgattatcgctggtctgctgctgttgctcccggggttctttaccgacttcctcggcctgctgctattgctgccgccggtgcaaaagcatttgacgatgaagctgatgccgcacctgcgcttcagccggatgccgggcggtggctttagcgccggtactggcggcggagagaccttcgaaggggaattccagcgcaaagatgagcagcgcgaccgtctggaccataaggacgatcgccgcgattaacatccccccggcccggtcagcagatgcgaccgggccgctttctttgcaggcctacacgcttcccgtcgccagcttgcgcctgggtaaaaacagccacagccccgccagcatcaccagcgcgtacaggcttttccagccgaccatcgccagcagcagcagacagagaatgctgcccaccactgccaatagccgatagcgaccgcgcagcaaacgacaacccgccagcatgcacagcagatagatcatgatgaaaatgccattggcgtaaacgatcagcgcgtccagattgatatcgagcagatagatgccaagtgtgctaactacgcaggatcccagcacggcgttgagggcgttgcgcgggatctgccgtggcgacagccttgcgaggtagctgtgtggcttatgctgcgcttgcgaccagaccaggcgggcaaagctttgaatatagatgttgaggctggcgaaacaggcgagatagccgatgacgcaggctacccacagcgcttcgacgccgaacagacggaccacgatattcggtaatgacgccgccgccgccatctcctcgccaaaggcgtggaagtgcagcaccagcacggtgcaggcccagtagaccgagccggcaagcagcaggcctatcatcagcgccctggggaaatcacgctcgggatgtttaaactccgaggcgagatgcgcgaaggcttccagaccgacaaagcaccagaacatcaccgacagcgccgaaaagagctgcccgcggtcaatctccgccggggccgggaaggggatctgcgccgggcttatcccgccgcgccaccagactacgacgatcagcgccacaatcagtacggcaaccaacgtctgcaggttggcgctggagctggcgccacgcgaaccgacccaccagacgatggccagggtgcccagctccgccagcagcagctgcgcatcatgccagccgaacagcgcctggccaaaaccggtggcgatgtgcagggcggcggggagtccgaccgggataaccgataaaaacagccagccggtgacgctggccagacgtggcccaaaggccatatcgacaaagtgggccacgccgcccgcgctgggaaaatggcggcccagcagggcgaagacgatggcaatcgggaaaacaaggagaatgagcagcggccatgcccacaggctgttatcgccagcgaccagcgccgccagcgccgggacggcgaagacgccggtacccagcaatgaggtggaaagcaacccaactccctgtcccagccctaactcctgttttaaaccacccatgattcaatcctgcgccagtgaaaaaaaagagagtatcacaatcgcttttccttatgaccgattgcctgacatggccgctttttgtgcgccagcgcaaaggtaaaaattttttttaattttgcccttgaagccgtaaatggccatccccatctctctctgcactagccggtaaaccgcgttcggcccggcgtcacccataactgataatgactttctcgaaggagagctatcaatgagtattcgtccgttacatgatcgtgtgatcgtcaaacgtaaagaagttgaaaccaaatctgcgggcggcatcgttctgaccggttctgcagcagctaagtcaactcgtggcgaaatcatcgctgtcggtaaaggccgcatcctggaaaacgggaccgtgcagccgctggacgttaaagttggtgacatcgtgattttcaacgatggctacggcgtgaagactgaaaagatcgacaacgaagaagtactgatcatgtccgaaagcgacatcctggcaattgttgaagcttaattcgcacgaccctgaacgaatttgaggaataaaagaaatggcagcaaaagacgtaaaattcggtaacgacgctcgtgtaaaaatgctgcgcggcgtaaacgtactggcagatgcagttaaagtgaccctgggcccgaaaggccgtaacgtggttctggacaaatccttcggcgcgccgaccatcaccaaagatggtgtttccgttgcacgtgaaatcgaactggaagacaagttcgaaaacatgggcgcgcagatggtgaaagaagttgcctctaaagcgaacgacgcagcaggcgacggcaccaccaccgcaaccgtactggctcaggctatcgtgaacgaaggtctgaaagctgttgctgcaggcatgaacccgatggatctgaaacgcggtatcgacaaagcggtactggctgcagtagaagagctgaaagcgctgtccgttccgtgctctgactccaaagctatcgctcaggtaggtaccatctccgctaactccgacgaaaccgttggtaaactgatcgcggaagcgatggataaagttggtaaagaaggcgtgatcaccgttgaagacggtaccggtctggaagacgaactggacgtagttgaaggtatgcagttcgaccgcggctacctgtctccgtacttcatcaacaagccggacaccggtgccgttgagctggaaagcccgttcatcctgctggctgacaaaaaaatctccaacatccgcgaaatgctgccggttctggaagccgtagcgaaagctggcaaaccgctggtcatcatcgctgaagacgttgaaggcgaagcgctggcgaccctggtggttaacaccatgcgcggcatcgttaaagtggctgcggtgaaagcaccgggcttcggcgaccgtcgtaaagctatgctgcaggacatcgctactctgactggcggtaccgttatctctgaagagatcggtatggagctggaaaaagcgactctggaagacctgggccaggcgaaacgcgtggttatcaacaaagacaccaccaccatcatcgatggcgttggcgaagaatccgcaatccagggccgcgtagctcagatccgtaagcagatcgaagaagcgacctccgactacgatcgtgaaaaactgcaggaacgtgtcgctaaactggctggcggcgtagcagtaatcaaagtcggtgcggctaccgaagttgaaatgaaagagaaaaaagcacgcgtcgacgacgccctgcacgcaacccgtgctgcggttgaagaaggcgtggtggctggcggcggcgtagcgctggttcgcgttgcggcgaaactcgctggcctgaccggtcagaacgaagatcagaacgtcggtatcaaagttgcgctgcgcgcaatggaagcgccgctgcgtcagatcgtgtccaacgccggtgaagagccgtctgttgtggcaaacaacgtgaaagctggcgacggtaactacggttacaacgcagcaactgaagaatacggcaacatgatcgacttcggtatcctggacccaaccaaagtcacccgttctgcactgcagtacgcggcttccgtggctggcctgatgattaccaccgagtgcatggtgaccgacctgccgaaaggcgacgcgcctgacttaggtgctgctggcggtatgggcggcatgggcggtatgggcggcatgatgtaatcgtgcgctctacggcataaaaaagcagaaacccctggccagcaatggctgggggtttttcttttggcgcgctttttagtataaggcttatacataaaaatcatttaagctgcatcagagcggcaagcacctctgtttcgggcgtgaactgacaagcgcgaccggggaggaaatgaacgcggctcatgccgacgcagtttgaaggatgacagatttacatccgggccagtgcgtccagctcatcgatcatggggaataacatgcaggtaaaatatttagcagggattgtcggcgcagccttactgttggcaggttgcagttccagcaatgaattaacctctgccggccagaatgtgcgcttcgtgcaggagaagccgggcgcagagtgtcagctgttagggaccgcgacgggtaaacagagcaactggctctccggccagaatggcgatgagggtggttccatgcgcggtgcggcaaacgccctgcgcaaccaggcggcagcgatgggcggcaacgtgatttacggcgtcagcagcccgacgcaaaacctgctgtcgagctttgtgcctaccgacagcgaaatgaacggccaggtttataagtgcccgaactgatgcgtgacgcctctctccgcgagcgcagagagaggcgtggtcgttagatgaggatcaggcgctaagctccgctttcttttcaaggtagaaggcgtgtaggggacgcaggcattcttccagactgagcattcttcccggctgggaagggatgatagtactgaagatctggcatggcgccagctccgcgtgcatcgccttgagcttggggcttttctcgataatccgcgtcacaacgttgttttccagttccgacaaatgcggcgcgctggttttcaccaccgccccggagacaattttcttgccttcgtctgtctcgcagcagtacagcacgcccagataatgagaaaataggtttagcttccagtcttcctgagtgtgttgctggtagtcaatattcggctgggtagtcaagtcgacagtgtagcacattaaaaaatccatatttgaacttaaatacttcaaaacctcttgatcattgattgttttcaatgcttgttgaacacccgcgagtaatgcctctacctgcctgtcttcaatacataatgtgcagatttgctcattctggagaaccagaatgagagtcgattcagtctcgcctggtttaagcgtaatcgacataatacgccgctcaggattcggctgctgaatctccgccatctctacggcagggatgttagcgatcagcgattcattataagcgataagctcttctttataggtttccccttgttcgtgtaatcgcttatacgtcacaagcagacgattttgaagtatgagaagaagatcgagtagtatgggcgcttgtagatagtattgctgacaggggccattttgctgctttatttttaacagcagcgccagaaagcggtcttcaaaggtaatacctgcagtattaaatccaataaacgttccttgcataagtttctccttttaagctggcgagagggtctttgtctgcgacaggtcgataacgcgatcggcagaggcaatcgtcgatggccggtgagcgacaataatcctggtgatgcttaatgctgaaatagactgatttatcaccgactcattttttaagtcgagatggctggttgcctcatccataaaaagaatacttggtctacgataaagagcgcgagcgatcagaatacgctgcttttgcccacctgaaattcccagtcctagctcgccgactatggtttcatagcccatcggcatcttgatgatctcatcgtgaatattgcagcgtttggcgcattccatcacaaaatcaatatcggcgttatcttcgaagccgctgatattatcgataagcgacccagagaaaaggcggtcctcttgcagtacgcaggcgataccaagacgataattattgagaccaattttggtgatatcgagattatcggctaacacatcaccgctggtgggcgacaacagaccgcacatcacttttaataacgtagttttaccgacgcctgaagggccgacaagtgctacggactcaccgggttctacggttatatttaaattagaaaagatcggctgagaaaacggatcatattgatagcacaaatttttgacttccagtttggcacccgagtctgcagaaaaaacctctcttgtgggaagctcctgttccggttcgctgaaaacgatctctgacagacgttcgttatgtagggagagcattcgcagttgcatacaaagatcgaccaaactagaagcgcgttgtgaaaattgaccacgataggcgttaaacgccataaacataccaagggtcatattattatcaataaccataatcgcgccaagccagagcacggcgacctgatcgatagcagtaatgaaggtattgatcccactaaatagcatatcgaaacgagtttgtttgattccagcgttgcaggcttcgatatttatattaagccaatgctgggaccgacgttctttcaagtttaatgccttgatggtcgagataccgtacaatgactccataaaatgcgaactggagcgagcacctttgattacctgctcttctgctacacgacgatagaatcgataagttgcaaaacgcataattgcgtagcataaagtaaagccaactacgacccaagttagccagccaccatacaaagttagcatgatcagcagaccgatggtcatgattgagtcaataatgccgctgacgatactgttagtaaacgtcgagcgaatggtatccaaagaggaaaaacgcgactggatatctcctaaatgacgcttttcaaaaaaggatagtggcagactggccagatgatcgaaaagcgtggttttccactggatacttgtcagggtattcagcgttaaggacgtccaggcgcggagcatactgatgaaggtgcgaaatagtgtaaaaaagaccaggccaatgcatataactgatagcaggctttggtcgtgcgccataatcacatggtcggtaaccagttgagtacctatcgggagtagtaagccgatggcttccacgaccacggagaaggcaaaaattttcagcagcgctgattttaagcctactatattgcgcattagatccagcagacgaaggcgggacttagccttttcctgctggaagttctgatcgggccaaagctctaaggcaacgccagtaaaataattggacatctcctggatgccgataatacgcttacccagcgctggatcgtgtacgataaagctggatttgcgaactttagtcagcaccacatagtggttcatgccccagtggagtacacagggcaacttgagctggcgtatttcatccaagtctaacgacagcgcacggctttttaacccagcatgctccgctgttttgcttaaggacatcagtgtcacgccctgtgaaggactaccaaaacgctgccggaaattaaacaggtcaatatccaagccgtaatgaccacaaaccatggccagacaggcaatgccgcactcagcggcttccgattgcaatataactggcgttttctttaggagagaaaagttaactttcgcgatgatcttttcaaatagttcattagtcattgacagggccgctcacgctttgagaaattttataaactggtgtaaacatccacatataaagcgggcgttcttcaaggaataccactgcttgtgcttttaatccatttgaaagagaaagttcttttccatcgtaattaaattttttatcccttattttgacaattgccttatataatgcaagttcttgttgattagtgccatcattgacattggtatattctgacatttcctgtcgtgaggcaggaagtgatgagatagaaatgatctcaccagggaactgtccgaacttatcggaagggaatgcatcataacgaatatttattgtgtcgccgactttaacataaggaatgctgttgttaggtagccaaagtatgagataatactcgatgttaccaataggtttgatttgggcaagactactgcctttatcaaccatttggcctttagtgacggctaatgattcaatgcgtccttccgttgttgccttaatgataatatttccgttagcgtttgattctactagttgatttttataatcatttgtctgattatattgcgatgatatttgattatcaaaatcggcagctttagtaactttatcactgcttaactgtgtaagctgagtttctagttgcatcttttggcttatcaatgactgataggcgctttgctgttgaaagtacaacgaatgttggtaattgtattgatcttttgtaattaacccctccttaaggtatttatcataactggacaggttttcatgcattttgcttaagccttgttgcgtattggccagcatacgtacagtttcgttaagagagtttctggcatttttaagctgggcatccagtgcaattagtgtttcgtttttattatgagttagtttttttataatagcttcggagttggctatcttttcattgattacctcaatctgtgctgcactgacattacctgttgtggtatttctagatacatcaagctcataaagcgtctgtccttttttgacaacgtctccaatttgaacatactgattgacgacaaacccttgttgcggagagaaaacgtttacggagtgagggagagtgataacctcgcctttgacatcaatgcgttgtgtaaatttacagaatataagggcgcagataagagcgcagagaaataaaagagataaacatgtaactagccatgcaggcaagccagccagcaatagcgctttccctttccagtgcaacttcttataagctatcgcttccttgcgataaatactattagtcatgagtgttcacagtatcaacggttaattcaaaggctcataaatgagcctttgaatatatagtaatcttaataatcaaatgaaaattaagaactcttagtggctccatggcacaaaggagccatcgataatgcccagcatggcttgcatggactcattcacggatgcctcccagcccaaagctgcatagccaaccgcgccgccaatagctcccatgattgttccccagacagcgccaaccgcgttaccaagtaaaccaaaacctaaaagaccaccattagcgccggattgagtaccgccccaaagcaggccatagaccccccatgtgatagctcccagggcggctgatgcagctgcttctacaccattacttaccagactggtgacggttgattggattgaggagaaatcccagctataacccccggaaatggtatccatttcaaatacagttaattctttcacgcaataattccttttgttggtaaagttatgatctaataaaataatgacatttatcgagtctgtagattatttccaaacgacaaaggtgccatcaactaaaccttgtgcgccagcttcgataattgccatggtcccgtcccatccccaggccagaccacatcctgcgccgaggattgcaccaccgactaagcctacaaacatcccgacgaggttaccaaagaggccaaatcccaggacgccgccatttgccccagcctgtgtaccgccgacaaaggtgccaaagacggccgccagagttcccatggtggcagcagaaaccactgcttcaacgccattacttacgagactggtgatgctggattggatggaggaaaaatcccaagaatagccaccagagatggcctccatttcgaaaacagtcaattgcttcattaatatatcctttattgatgaaattatatttcgtattacaagtaggcttaatataagccggggaggaatttaagtgagagacctgaagagatcaatagcatcctatgtgaattttatgtgatttcattaatcatttatagtgtcatcatgaggactataaagcaaaggagatgcatgatattaagctatgcaccccctcaatacaaagttattattcttcctgaataacaacttccatcattcctttaacaagccccatcgtaacatcgttactgttatcactttggcgataatagtcggcggttaggttgatggttttgttaagatcgttgctagtgtttattttataattgtaattatcggtatcatagaaaacaacaggactacctgaaagtttgaatataatacccacgttatttgctgcatcactgccggaaagcatattatcgacaataccattccctgaagcgcttattcctccaacaggattaaaccaatagatgagagtattgccaacggagtcattcgggcaactaatattcatggcaatagttttctccgacggagttgttgcaccacgggaaagtgacatcaattttcctttgtctatacgattcagcgtgatttgcgatcgtggtgtggagatattacaagatgttgtgcggtaattaatatttttaatagagatagaggttacagcgtataatagtctgtcattggcaacagggtttgtttttaaattccctaccgagaacgaaactgaggggttagatgttgacttggtgctcgtatcaatcaccgtcttagttttgattaaccataccgtaataaattggtaattattttcagatgagcttgttattggtaccaaggttgaacctgcctcggcggcgatcaatgaaccatttttactacgtaacagatcggagacctgaaacccaatcccatcaatccccgtttcataaaccggaccaccctgaacaccggtaacaccaggaacaacggcagccccgacgtcaataatatattggtcatcggtgtttttattacaggtaaatgttttatatgcgccagtaccaaatttatgagtatgtaacacgctacctaccggaatggaagcatctgttggtattttaatattggtcagcgttaagccttgacgcttggtattgcctttataggtacaattggtagcagcttggccgccaagcatcagcaacgttattaaaataactatttttttcattaaaatattcccctgtgaatgactaacggcaaatcgtttcgatttgcctgatgccagacgctttgccttccctggtcggtaaagtaaatgaagcattgcactgctgcgcggcgcttttgccccactggacgttaaggatcccggtctgctgcaggccagacatataaaccataccagcgtcgctgacgatacttggctgcgatttgctgtcgccgacgagtaggaccatcgcgccataaggcacatcctgcccactggctgttttcaggtgcacaaaggcccgctggccgatattgccgtcatagcttgcacgcacgatggcgccacgcgtcggaacaacactcttggtggtttctggcagttccatatcttcaccaagcgtggtgctgtcgagcgtgatatcggtgcgacgataaggcgtaacatacgggacgatggcgtagccgcgatagtcggtggagatggtgttatcgttggccagcctgacgtcatctagccctggtgctttaaccagcacggcagcgtcggtgatatcctgacccagcgtaattccatcggcatgggcaaggatgctgccgttggcgccgtagtcgatacgttggctgttattgtcatagctatagccggcattaacgctaccgcgggcaccgttataggttgcgcgcatatcgccgctgtagtattcgcggttgctgtacccttgatgtaggctccattccagactgtcgttctccagcgcattaccaccgatggatacagactgatcggtagaccccgggttgctgttagttaattgatagctggtgtaagtgcccggtagccagttgctcagtggcagcgttacggtcagagtgatgcgctgatcgtcctgagcatccttaccagagttatctccgctccaggtgtagcggttatagctgtagccgaggtagtagttcacattacggaaaccgccgttgtatcctacgctaattgatttgttggtacgcttatcatcccagtaatcttcaatcaatccgcttatcgacaggctaccgaggcctttacccaggctttggttcagcgtcaggttggtacggttgcgtagcgaacgagaggtataactgccgtcattagagtagctatccagtacttcggaaagcgtattaaacccgcgagtagagtagcgatagccggcgatggtgacgttggtgccggtttcgacaatgtttttcccgtaacgaactcgccaggactgtccggaagtcttttcatcctctttcttttttgaccaggcttgggtgacgtctgccgaggcggcgcccagttcaccaaggttatagccaagccctgtcgacagcgcctgatatcgcgaagccgcctgcatgccgccatatagcgtcaggctgctggagacgccgtaggtcgcggtggcttgggtaaacggcgtttcatcgactccgccatcgtacgggcgatatttaccagatgtgatctcatattccagctgatcctcacggaccatcaccggcagggtggcgaacggcacgacaaattcttgtttcgatccgtcggattcctccactgtgacgtaaaggtcgccgctaccgccgctcgggtacatatcggtgatttcaaacgccccgggagcgacataggtctggtatacctgatagccgttttgtttaatgatgacgcgggcattggttctggcgataccgcgaataattggcgcatagccgcgcatactttccggcaacatcgtcgtatcggtggccagctgaataccggtaaacggcacgctgtcgaagataccgttgagcgatgaactctcacccatcacaaggttactattgatggagcggatgctgcgctgcatatagagataggcggaatcccagtccccggcaccgctgttgtttttattccaggtgctgaggttacggatgcgccacgggccaacgttgaggccggactgcagattcagactgtagtattcatcattggcctgcatgtcgtttgagccgctgaactgatagttcaccaataacgcgttgatgccgtcatcaaactgatccggtggaatatatccctgtgcggtggtggataaggccgcctgcggaatagagatatttaagcgctgggcggtaaagtcaaaatctgctttggtgtcaggaatgacagaaaagtttgcacagccgttttgatcctcggctaactctggaaaggcttttatccttacgccatattccgcgagtgcttttagactcaggcagggaaccagagcgggttcgcggttatcgctgctggcgcgattgttggcgacaaactttatggtcctggtgtccaggtagcggccattaaacataatatcgacccgataatcccctggcgcctgcgcgttctgagtctgaaatatggataaatcgggagtggttgatggatcgctaccattcaatgagctaatgaatgagggatcgaaaaagtcacgtgcttgcgctttattattcaaaccagaaagcaatgccgaaagcattgcgataaagacagtggatagtttgaataatccattattcttatttggcatagacacatccctataatgataaaataaatttcttattacagcgatgaggaatagagcgaccctgctccgccataatcattgacgatcttccaggtaatgctggaggcgctgatgttttcttttagcgtcacctctttagtggtcattggagcgaccgagttgacttctggtttcacttctttgccaccgatctgaatgctatggaaatagtaaaaaaacggtgtcggatttttgatcgttaatttagtgccagctttacgccattcgagctttttcgcttccgtattaggggatagatcgaaaagcgtcttgggacgatagaccaggcgcatgcggtggcggaccgccagttgaatggtattggtgctggctttttcatcatcagccggaggaattgccatcacgttaaaatagtacaaagattcgcggtcagtcggggcattaacgtttccagttgaaaacagacgcaccgtattctgctgttttccctcaaggcggaacagcggcggggtagccataaaagaaggcgctttccctgccggggtttcaacccaagatttaatcagatagggaatatcatctttattttcgatttgcgcggtaatttcccgtgcaccttctttataaagatagcgggtggattcaatgacaataccggcgtgggcaatactgctgaggagtaatacacaggatgcggtgagatttaataaggtcctgaacatggtttttctctgaatgcgaaaaagggcccgccgtaaagcggtgcccttcggaaaaaattagagggtgtaatcgatagtaaaggtcgcaacacctttaaccggaccttcagttaccggggtcgcggcgttggttcttacataaccagtggtgtatttcagctgagtaccgctagcggcagagtagctttcggtcatagtgtcggaaccgtcgaaggctacgcgatgggaatcgctgatgcgctggataccgataccaataccggttgcaccattagaagcagtgttgtccaggatggtattgtcgctggaagtaataccggaaacgtttacagttacgccagtaaccggtgtagcgctgccctgtgcacagtcttttacgtcaaaaccgaaatcctgagttttgaacagggtacccgctgattctgcattcgcttcggcagtggttacggtgatcagctgaacgataccgctattcagagtaccggttggggtcacgacgcaagagttagctgcatcagagacttcacccagtacagttacctgagcggtgttggttgccattgcctgagcactcagcactgcagatgcagcgaccattacagctacgattgtctttttcatttaattaatccatatatagatacttagtcctgtgtagaatcgataacagttatcaagggaatggagtatgcattcgcattgatattgaaaataagcgtcagctttcctttatatagtgctgagaccaatcatcctgttgaacgacgctaccatatcgcttgccatagcgaaccatggagaagcgggagtaatttaaaagtctggtgcaaaaaatgcttgtgaattattgatgaagcacccgtgaatttaatgctgcccccctctctgatgagatgtggattccagttgagattaatttaatctgaaaatgtgaccattaagcaagttagctatcgcttgtttttttatctgcggtatcctgtgggctgaacttcaatgtgaaatgtacctgtttccatctgaaacaagagtgttcacataatcgtttggttgaaatcatttgattttattatggataatagggttacgtggggcaaggatatggatgacgcagtattatttaatgggtgtataattaatcaggagattatatttaatgccaatatgaatgagctgcggccgcttgccggggacggggagtgcatcagcctcaatgcgccaaccgccagatgcttgctgctgcttttgcagaattgcggcaaagtcatttcacgggatgagttcctggcggctgtatgggaaacacggggggtggtcgtttcgcaaaatacgttctatcaaaatatctctttgctgcgaaaatcgctggtaaaagctgggctatctgaggatatcattatcaccgtccggcaaaaaggctttagcgtcgctccgaatacattggtcattcctctctctgatgaagagtgtgagaatatgaaccgggtgacattaacgcattatcagaataataaagttgttggctttatttctgaagataaggaaaaacctgacactcatttaaatcttccactaatagaaaactcatcaaatcatggcagtgatttgatggcaaataaaccggaagaaggtgaaaaagtatctgagcggttacatgttacttttaaaatacccatatggttaatcgcgctaattgtcgtgatgattgtaattaatattattgtgttggtcgtgctaaaccggtagctcgtcgcacccaggggttatagcgcggtgcgatagtcatttgctggtcaccttaacacccgtctgtcgaaatcttcctatccgaaggtctgccagaacgtcctggcagaccttcagtttattaacgctgcttcagccctaaatccagcggcgtcttgctgggttccccgccaatctcgcgcgccagcttcggcaccatatagccggagatgagggtcaatagttcacgcatgatttcacgggcttcatcatcgctgaccatgaagtgcgccgccccctgcacccgatccagcacatgtaagtagtagggcattaccccggcgtcaaacagcgcattgctgaggtcggccagggtttgcgcgttgtcgttcaccccgcgcagcagcacgctctggttgagcagcgtgacgcccgcctgacgcagcatggccatcgccgcgcgaaactcaccgtcaatttcattggcgtggttaacgtggttaaccaggatcacctgcagcgacgaacgctggaagcggctggccagcgtctcggtgatgcgcgccgggatcacaattggcaggcggctgtgaatacgcagacgcttaacgtgcggaatagcttccagctgggtcattagccagtcaagctcatggtcctttgccatcagcgggtcgccgccggagaagatgatttcatcaagctgcggatgcgccgcgatgtagtccatcgctgtctgccagttgcgcctggtgccctgattttcggcataagggaagtggcggcggaaacaataacggcaattgactgcacaaccgcctttcaccagcagcagggcccggttgcgatatttgtgcaacagaccgggcaccacgctgtgctgttcttccagcggatcggtggagtagccgggggcgacgataaactcttcctcggcggtaagtacctgacgaagcagcggatcgttagggttgcctttctccatgcgggcgataaacgcgcgcgggacgcgcagcgggaacaggcgtctggcctcgcgtccggccagcagtttttcatcagcgtctacatttaaaagacgcagcagttcatcaggactggtcacaacattggcaagttgcgttatccaatcttctctggatggggtatttagggttacaatatgcgccattttgtggcttagctaccagttaaacaatttcagagggccttatggcgacttactatagcaacgattttcgtgctggtcttaaaatcatgttagatggcgaaccttatgcggtagaagccagcgaattcgttaaaccaggtaaaggccaggcgtttgcgcgcgttaagctgcgccgtctgctgaccggtacccgcgttgagaaaactttcaaatctaccgattccgcagaaggcgcggacgttgtcgatatgaacctgacttacctgtacaacgacggtgagttctggcacttcatgaacaacgaaaccttcgagcagctgtctgctgacgcgaaagcgatcggtgacaacgctaaatggctgctggatcaggctgagtgcatcgtgaccctgtggaacggccagccgatcgcggtcaccccgccgaacttcgttgagctggaaatcattgaaaccgatccaggcctgaaaggcgacaccgcgggtaccggcggtaaaccggcgaccctgtctactggcgcggtggttaaagttccgctgttcgttcagatcggcgaagtgattaaagtggatactcgctctggcgaatatgtatcccgcgtgaagtaatttcgcgtcatgatgaccggcgtagcctccgtgctgcgccgctcttttcgtacaggcacaacgagcacgatacatgaagcgcagcgttaaactcctggtgttactctttctgagcagcgcactgttggctggctgcaataccgcccgcggtgtgggtgaagatattcagggcctgggccacgctatctctcacgctgtgagctgaatttccctgccgtttcgttaatggcgcttgcctcccggtatgtcagcctcctccacgcatactccttttctcttaaaaatcgcaaagatcccttcatctttggacggtttgtctatgcttatagggcatgaaaacaaaactgacactaaggatgacattatggtgaaaaaaacgattgcagcgttctttacggttttggtcctctcttcagcactgaccgcttgtaacaccacgcgcggtgtcggtgaggatatttcagacggcggcaacgcaatctctggcgcggcaaccaaagctcagcaataaacgccgtcaacggtacggtttagcgccgtaccgttcttcacttctctcattccgttggatatactcaccacgacttttcatccaccttacgggacgacccgtaagcgtttctcatccggggacggccccagcaaaggagccttatgtcctggatagtcttgtttatcgctggcctgctggaagtggtgtgggccgtcggcctgaaatatacccatggctttagccgcctggttcccagcgttatcaccatcgtggcgatggtggccagcatggcgctgctctcatgggcgatgaaaaccctaccggtaggtaccgcctacgccgtctggaccgggatcggcgccgtgggcgccgccgtgaccggtattgtgctgttaggggaatccgccagcgccatgcgtatcgccagccttgtctgtatcgtgattggcatcattggcctgaagatcagcgcgcactaatcatagcgctgattgacccagaccagtttgccgacatcaaagccctgtcgggtggcaatgtccagcatctgctgcctgacctccggggcgatggtcggcgcccgggccagcagccagagatagtcgcgatcggggccgcagaccagcgcgtaacgatactccttatccagagcaatgacgttatagctgccgtagaaagggccgaagaaggaaatcttcagcgcggcgcggctgggctccccggtaaagtacgctaccccgtccgttttctgccacataccacggtcggggttatagcctttattgaccacgtccaggccaccgtcatcgcgtgggtgccaggcgatcgtgaccttttccagcccgctttcaaaagggtggtcaaagcgggcgatttcataccaggtacccagatagcgctgaacgtcgaagggactgaccacggtgacgcccggcggcggggcgggcgtgctgcaggcgacagacaggaacgagacggcaatcgcggtgattatcggcaggatacgcatggcatgctccttgctggcttttaagctaagtgtagagtccagcagggaaaaggcggcaagatttttctatgaagcgagcccggtagcagaaatgcgaccgggctcttgcaggatcagataaatagtacgccaacgagggtgatgacgctgaggattgccgccaggccgtagaagacccatttaccgttgggcacatggattttcagatcgtgcatggcgtggtgaatacgatgcaacccacaccacagcggcaggacaatcatcagaaagatgaatgcgcggccgataaagctttgggcaaaggccagcacacgctcatagctaaaggcgtcggccggggcgagccccagcggcagcaggatgccgaccagcagcaccatcaccggcgcgacgatcgcgccccacatgccgcctgcgccaaacagcccccagaatacgggttcatcggaacgtttcggattgggattaatcatctcagcctccttaccagaacagggcgacaaacaggatcaccacggtgaccaccgccgtcaccacccagagccctttaatgaccggctctggccccattttttcgcctttgatgatgacgttggcggctttcggcgccagctcaaaccaggttttggtgtgcagcagcgccgccgccagagtaatcaggttgaggattaccaccaccgggttttgcaggaatccgatatatcccgcccagctctcggcgccgtgcttgagggcaaacagcccataaatcagcacaatgctaaaccataccgtcggtaccgccgtgccttcccgtaccatgtagaagcgataaaacggcagctttttccaccaggtggaggtcattggtcgcacgtagggtttgcgtttcgtcgtcataatgcgctccttagcgtggtttcagggtggcgataagaaagtctttcgagctttccaccttgccctgctggatcgcggccgccgggtcgacgtgcttcggacacacttccgagcagtagccaacgaaagtacaggtccagacgccattctggccgttaagctgcgccatgcgttcctttttaccgtggtcgcggctgtcttcgttatagcggtgggcgagggtgatcgccgccgggccgataaattccgggttcaggccgaactgcgggcaggcggcatagcacagcccgcagttgatgcagccggaaaactgatggtatttcgccatctgggccggggtctgcttgtttggcccctggtcaggcgtgcggttattgccgatgatatacggcttaatggcttccaggctttcgataaagtgggtcatgtccaccaccagatcgcgctcgatcgggaagttggccaatgcctccaccttgatgcctttggtgtaatcgcgcaggaaggttttgcaggccagcttcggcaccttgttgaccatcatgccgcaggaaccgcagattgccattcggcaggaccagcggtagctcaggtctggcgccaggttgtctttgatgaagcccagcgcgtccagcagcgaggtctgttcatcgtaaggcacgtcatagaatgcgctgtgcggtgcggtgtcgacctccggattgtagcgcaccacttcgactttcaggtttttcatctcagccatgggtggtctccttcttctcagccgcgtccgcttctgcgccatagacacgttttgccggcggcagcgtggtgatcttcacatcgccatattccagacgggtagtgccatcggcctcgcggaaggcgagagtgtgcttgaggaagttgacgtcgtcgcgttcggtacagccttcatccagacgctggtgcgccccgcgcgattctttacgggcgatggccgagtgcgccatacattcggcaacgtttaaaccgtgccccagctcaatggtgtaaagcagatcggtattgaacacgctggagttatcggtaatgcgcacgcgcttaaagcgctcctgcagttcagccagcttgtcgatcgttttctgcatcagctccggcgtgcggtagatgccgcagccttcctccatcgacagccccatttcatcgcgaattttcgcccagttttcgttaccttcctgtttgacgagatctttcaggcggtgctccacatcggcagcctgcgcatcgagggcggcgccgtttgcctcgcccgcctgagcggcgcgctgcatggcctgctccccggccaggcggccgaagaccaccagctcggccagcgagttggagcccagacggttggcgccatgtaagccaacggacgagcattcgcccacggcaaacagccctttgatccgggtttcgcactgctgatcggtttcaataccgcccatggtgtagtgcgcggtcgggcgcaccgggatcggctctttcaccggatcgacgccgacgtaggctttcgccagttcacagataaacggcagacgctccagtagttttttctcgccgaggtggcggagatcgaggtagaccacgtcgccgcgcggcgtcgggatggtgttccctttccgccactcgtgccagaaggcctgggacactttgtcgcgtgggcctagctccatatatttattcttcggttcgccgagcggggtttccgggcccatgccgtaatcctgcagatagcggtagccgtttttgttgaccagaatcccgccttcgccgcggcagccttcggtcatcaggatcccggagcccggcaggccggtcgggtgatactgaacgaattccatgtcgcgcagcggcacgccatggcccagggccatccccatcccgtcaccggtgacgatgccgccgttggtgttgtagcggtagacgcgcccggcgccgccggtagccagcaccacggcgttagcgcggatctgcaccagggtgccttccatcatattcatcgccaccaggccgcgggcctgcccgtcatcgaccagcaggtcaaggacgaaatgttcgtcaaagcgctgaatttggggaaactgaagggaggtctggaagagggtatgcagcatgtggaagccggttttgtcggcggcaaaccaggtgcgttcgattttcatgccaccgaagcgccggacgttgacgctgccgtcggggcggcggctccatgggcatccccactgctccagctgggtcatttccgtcgggcagtgatgaacaaaatagtcgacgacatcctgctcgcacagccagtcgcctcccgcgacggtgtcgtgaaaatggtactcaaagctatcgtgatcctgggcaacggctgcggaccccccttctgcagcgaccgtatggctgcgcatcggatagactttagaaatcagggcgattttagcgttggggttggcctgagcggcggcgatagcggcacgaaggcctgccccgccggcgccaattacggcgagatcggcttgaaaagtttgcacgacattcctccagttttagtgtatttcgccgccgggctggcgaaaaagtatcactgctcctttataggtacaggagtatagccttagggtcagtatggaaaattgacgtgttcgatttttttatcgatatgtgcggttatttatcagtggtatttatgcgtcagggttaacgatagattaatggcatgtagtctgccggatattgcacaaaatttgtttcactcgccggttgcgagtagacttcgtgcccttaatttgcaatcggagaaagtaccatgagcgagacggcaacctggcagccgagcgcacccattcccaatctgttgaagcgcgcggcggtgatggcggaaatccgccgtttctttaccgatcgcggcgtgctggaggtggagacgccttgcatgagtcaggcgacggtaacggatattcatttgttcccgttcgaaacccgtttcgtcggcccgggccattctcaggggcttaacctgtacctgatgaccagtccggaataccacatgaagcgcctgctggcggcaggttgcggcccggtcttccagctgtgccgcagcttccgtaatgaagagatggggcgtcatcacaatccggaattcaccatgctggagtggtatcgtccatgctatgacatgtatcgcctgatcaatgaggtggacgatctgctgcagcaggtgctggagtgccaaccggcggaaagtctctcctatcagcaggcgtttcagcgccatctggaaattgacccgctctctgccgataaagcacagctgcgtgaagtcgcagcgaagctggatctgagcaatatcgccgatactgaagaagatcgcgataccctgctgcagctgctgttcaccatgggcgtggagccgcacatcggcaaagatcgaccaacgttcatttatcatttcccggcgactcaggcctctttagcgcagatcagcccggaagatcatcgggtcgctgagcgctttgaggtctattacaaaggtattgagctggcgaacggtttccacgagctgaccgacgcccatgaacagcgcctgcggtttgagcaggataaccgcaaacgcgccgcgcgcggccttccgcagcagcccatcgataacaacctgctggcggcgctggaggcgggtctgccggactgctccggcgtggcgctgggcgttgaccgcgtggtcatgctggcgctgggcgctgaaagcatcggcgaagtgatcgcctttacggtagaccgcgcctgatcgctttttcacctccctccgccgccgggtgggggaggtgaaagacgactctggacctgacaccctcgccccggctttagcccgaatacccacaatttccctccgtgattttgctactatccgcgctctttttatgaggccaggcgtcgctcgtcgggcgatgcccacgtttggatagatttatgcatcaacaactcaagaagatgagcctgatcgggctgattctgatgatcttcacctcggtgtttggctttgccaacagcccatcggcgttttatctgatgggctatagcgcgatgccgttttaccttttttccgccctctttttctttatcccgttcgcgctgatgatggcggagatgggctcagcttatcgtcgcgaagagggcgggatctattcctggatgaaccacagcgtcgggccgcgctttgccttcattggtacctttatgtggtttgcctcgtacgtagtgtggatggtgagtaccgccgctaagatctgggtcccgctatctacttttttgtttggcgcggacaaaacccagacctgggcgctgggtagcctgacgccgacgcagacggtcggtattctggcggcctgctggatggtcgtggtgacctttattgccgtcaaagggatcaataaaatcgctaaaattaccgccgtcggcggtatcgcggtgatggggcttaacctggtgctgctgctggtgagcggggcgatccttctgcttaacggcggtcatttcgcccagccgttaaacttcaccctttcgcctaatcccgggtatcagtcgggcatggcgatgctgtcgtttgtggtatttgccatctttgcctatggcggaattgaggcggttggtggcttagtggataagaccgataagccggaaaagaactttgccaaaggtattatcatcgcggcgatcgttatctcgatcggttactcgctggcgattgtgctgtggggcgtgagcgccaactggcagcaggtgcttggcgcgcgttcgaccaacctcggcaacatcacctatgtgctgatgaccagcctcggggcgacgctgggccaggccctgcacctgacccctgcggcgtcagccctgaccggggtctggttcgcccgtattaccggcctgtcgatgtttctcgcttacaccggcgcgttcttcaccctcagctattctcctctgaaagcgattatccagggcacgccaaaagcgctctggccgtcggtgatgacccgccttaacgtcaacggaatgcccgccgcggcgatgtggctgcagtgtctgctggtcggggtgtttatcgtactggtatcgttcggtggggatagcgcttccgcgttttataacaagctgacgctgatgaccaatgtctctatgaccttgccttatctgttcctgaccatcgccttcccgttcttcaaggcgaaaacccatcttgaccggccgttcgtgatcttcaaaaaccgtccgtcgacgctgctggcgaccggcgtggtgctgctggtggtgaccttcgccaatatcttcaccattatccaacccgtcatcgacagcggggactggaacagcaccctgtggatggtgggtggaccgatcttcttctcactgctggcgctggggatctacgaaagctaccgtcggcgcatggcgtccggcgcgctggtgatggagagttaaagaacctgcccggcggtgcagccgggcaggggatggtttacaggctaccagccgtacggcggctggtttttccggccgaggtcatggttttactgctttgcctgccgtcaatactttccagacgcatctggaacggagggaacggcatatcaatgccatgctcgcggaagcccgccaggatcagctgatgcatctcatggcgcagcggcatgcggtgccccatctccgcggcaaaaatacgtagctcgaaaatctggatcccctgctgcaggtcgacgagaaacgcctccggcgccggggtatcgatgaccagcgagcagcgatgcgccgcggcgatgagaattttcgtcacctcttcggtatcggcgtccacaggcgccggcaccgtcagcaccacgcgggtaaccgagtccgacagcgaccagttgataaactgttcggtaatgaacgccttgttcggcacgataatctcttttcggtcccagtcgctgatggtggtcgcacgggtattaatgcgggtgacgctgcccgtcaggtcgcgaatggtgaccgtatcgccgatgcggatcggcttctcaaacaggataatcaggccggagataaagttggcgaagatctcctgcaggccaaacccgagacccacacccagcgcggcgaccagccactgcagcttcgaccactcgataccgatcatcgagaagcccaccagcccgccgaccagcatcagcagatacttagtgatggtggtgatggcgtagccggtgccgggcgttaaatcgagatgctggaggatcgccagttccagcagcgcgggcaggttgcgtaccagctgagtggtgatgatcagcaccagaatggcaatcaacaccgcgccaagcgtaataggctcaaggctttccaccccttgtaccgtcgaggtcacgtcccacagcgagatattctcaaggaagccaaacgccgagtgaatttccgaccacagcacgatgaccgatagcagcgcgatcagcatcagcagggagcggacaagccgcagcgactgggtactgatggcatcgaggtcgacctcgctgacctccgtctccaccgacccttccgggctgctgacgtgaacgggctcatcttcgccgcgggcgcgctgagcgagaatttccgcgcgacgatggcgggcccggtcgaaggccagccggcggcgctggatcagcatccagcggcggatgatgtgatagaccaccagcagcaggaaccagatggcgaccgaggtttccagacgcgcaagcagcgcctgggcggtggcgaggtagccgacggcggccgccagcatggccaccagcggggcgccaagcatcaggttccacagcaggcggttcaccatattatcgccattcccctctttatccagatagagcggaataccggcgtgcttaaggctcagggtgaccaccgccagcgcgccgcagatcagcaggaagcacaggcggcccagcgaagcggagaattcgcggtcgttaagattatcgaacatgatcagcgccataatcagcggcacaatcagcccgatgctcatcaggtagtagcgcatcgccttcgccacgcggctacgcggccagccgaagtgggcgataaacagcccgtttggccgggcgaaggtggcgcagatcatcaccacccacagcaaaggcaccgtcgcggtgactccatcgccaatcgccaccgccagcgggaacggccaggcggactgcagaccatagccgagcgtcatccacagcaccggcagcggcgaggccaccagtatcgaccagaagaccgtgcgcagcgtcagccagaagtgatcctgggtgactttccccacccgggcgctggagcgctcgagaaagcgggtgaaatggcgccgcgaactgatgctaaagccaaccagcagcagggcggcaaacagcggcagcagggtctctttgctggtaagcatcatcgcgctggctttgcccagttcgctgatggtatccagggagatcaggcgccgcagatcctggacgatctccagcggccaggagaagccgatggggctgacgtccgaagtccagaacagatagcggtgggtggcttcgttgatctctttcagcgcgtcttccagctggccgttggcgaccttcagcttggtgagctccagcatcagggtgtcgccgccgcgcagcagcgagttcagcagctcgttctgcgtgcgcagctgcgcctgcaggatcttgttctgctcgctggtcagcggttcgccgtcggcctggcggatctgccgcagctgcggctgcttactcagcaaatcttcaaagcgcagacgctgcacgcgcagctgcgccatttccgtatccagctgctgcgggcgagggcgctccggcagccgcgccacctgggcgcgcagggcttcgcccagcagattggaggagcccagccactgcgactgctcgcgcagggtgtttaacgcctggcgcacctgcagcgtttgattcgtcgcctgccgctgctgggacgccaccagatccatgcgctgcgcctgctggttcagcgcctgggagagctcacggttgaccttaaactgggcggtgatgtccggcggcaggttttcactgttctccgccagcagttcggtactctccagcgccttttccgcctcccgctggcgctggctgttttgcagattgcgcagcgcctgcagataggcatccagctgctcgctctgtttttgcgccagctcggaacgggcgcgcgacagctcctggcggttgttggcggagagctgggcgaggtcgagttcatccaccagcgccttcagacgcgctgattccgcctgcagggcaagattttgcgcctgggcgagagcattgttgccggtttgcgtgccgatgcggcgctcaacctcattgagctgacgacgggcatcggtttgctgctgcggcagctggttcagggagtcggcgatttcacgcgcgcgatcctgctcctgctgcgcctggcggctcgattccagcagttggctgctgacctgcaggatctcctggttcagcgcatcggcggtcaggccggttggcacctggcgcggctcttcgctcagattattgagctgggcacgcaggctttgaaacagtttggggaaattgtcgataacgtcctgatactgacgggcgcgctcgagggatgattttcgctcctcaagcgcgttcagcgcggactgcagaacttcaacggtttcaggctgggcgggctttgccgccttcgcctgttccagttcctgggttatctgtttagcatccggggctgtcgcagcgtacgccccgaaactgaggctcaaggccaacaggaaagtgtatatcaggcgcacggcataacccttttgctgaagaattaaccttgatcttgtttatcgtcaaccagcgggctggcgcggtgttcggcgcggatctcttcttccggtaacggcgcgggttcagcggcggcggtcgcttccactgctgtcgccagcggttggccgatcttggtcacggacaggctttgcagcgtgtcgaccagcttcacctggcccggggcaaacaggttgatcacggtggaacccagtttgaagcggcccatctcctggcctttcagcaaggcgatggagccttcgttgtcgccagcgggccaggtccagcgtttaataatgccttcgcgcggcggggtcacggtgccggaccacacggtctcaatgctgccgacgatagttgcgcccaccagaatttgcgccatcgggccaaactcagtatcaaacaggcagatgacgcgctcgttacgggcgaacaggttcgggacgttctgcgccgtcaagtggttaacagagaacaggtcgccaggaacgtagatcatttcgcgcaggatgccgttgcacggcatatgtacgcggtgatagtcgcgcggcgacaggtaggtggtggcgaagctgccgttacggaacaggtcggccatctgatagttgccggccagcagggcttccagactgtagtcatgacctttagcctgcaggattttatcgttctcaatggcgccaagctggctgatcacgccatcggccggcatcaccagcacgtttggatcggtattcagcgggcgaacgtcgtcgcgcagcgggcgcacgaagaaatcgttgaaggtgcgataagccgcggtatccggcttctgcgcctctttcatatcgaccttgtagtatttcacgaacagatcgatgaccagcttcgtcagccaacctgcgcgtttgctcgcaccccagcctgcgaggcgggtgagccacagtttaggcagaatgtattgcagtgaaagtttaagatcgtttaacaaagtagcctccaggccatgatatgtcgttcctgaccccgcctgcgggcggggacctgaaaaaaggggacgattctatacgtaaaactcgccaaatggcatccgcgtaagctgcgtcatcatcgctgcccggcagcgcctgacgtgatgctcagcttaatgatcagtcatcggacgaggaaaagtttttacgcgtttttacctgtacctgcgccatgctttccaggatgcggtggtagttctcaaaacggctttcggcgatcttgccgttctctaccgcttcgcgaagcgcacagccaggatcggtatcgtgtttacagtcgcgatatttgcaacggcctaaataatcatggaattcgacaaagccgttggtgatttgttccgcttccagatgccacaggccgaactcacgtacccccggtgaatcaatcacatcgccgccgtgcgggaagtggtagaggcgtgccgcggtggtggtgtgttgacctaagccggaaacgtccgagacatcattggtgaggatctgatcctcgctcaacccgagcagggcgttcagcaggctcgatttaccgaccccggactgcccggcgaagatactgatgcggtcggtcagggccgcttccagcggcttaaggccgtcctgagtccgactggaaaccagcagcacgcggtaaccgatgttgcggtagatatccatttgctcattgacgaagcgcagaccatcatcatccagcagatcgattttattcagcacaatgagcggctcgatatcctgcgcttcgcaggccaccagatagcgatcgataatattcagcgacagctcaggcaggatcgcggaaaccaccacgatctggtcgatattagcggcgataggcttcacgccgtcgtaaaaatccggacgcgtcaggacggaggcgcgatcgtgcaccgcctcgacgatccctttgacgcttacgccgtcggcggcgtctttgcccggccgccagaccacgcggtcgccggtgaccagcgagcggatcgtccggcggatattgcagcgatgcacgctgccgtcagcggattcgacgtcggcatgcataccaaagcgactgatgacaatgccttccgacgtttcgccaaacaggttgtcatcgtagtcggccttctccgcagtggttttcagacggcgctggtggttggctttgacgcggcgctgctggcctttggagagtttatttttactcaatcgaactggctcctggtcgccctgatggggcaaaacctctatgatacacgctattttagatgaatatagtcacgcgagaagggtggaaaatagcatgagtgcaaatgaaaacaacctcatttggatcgatcttgagatgacagggctggatccggagcgcgatcgcattatcgaaatcgccaccctggtgaccgatgccaacctgaacattctggctgagggcccgaccatcgcggtgcatcagtcggacgctcagttggcattaatggacgagtggaatgtgcggacgcataccggcagcggtctggtggatcgcgtaaaggccagcaccgtcagcgagcacgatgccgaactggcgaccattgagtttcttaagcagtgggtgccggcgggcaagtcgccgatctgcggcaacagtatcggccaggatcgtcgcttcctgtttaagtacatgccgcaactggaagcctatttccactatcgctatctggacgttagcacgctgaaagagctggcgcgccgctggaagccggaaattctcgacggctttaaaaagcagggcactcatcaggcgatggacgatatccgcgagtcggtcgccgagctggcttactaccgcgaacacttcattaagctgtaaaccgcgaccgggccctgtgcgcggcccggtacacttttctgcgttatttaaaccacttctgctgcatctgctggaagtcaggtgtcgccatgaccgcggccagggcatcgttgatggcgttcagcagctccggatcgtctttgcgcaccgcaatcgcatactgcttaccgtaataagccgggtcggtggcccgttcatccatgatggcgtagtcagggttctcctgctgccaggcgtcgagggtggcgaagtcgcccatgacgccggttatttgcccggctttcagcgcggccagggcgctggcgacatcgtcgtaagggacagcctgtacggctttctgtttatcacgcaggtagcgctgatgcagcgtgcctttcaccacgccgacttttttagctttcagatcggcaaaggtatgggcgacatctttgttgacgatcactaccccggagagcgcctggcgatagggtcggctgaaggcgacctgcttctcacgcatcgggatcacttctatgccggcaatcaccgcgtcaaatttcttaaagcgtaaagccgggatcagggtatcgaaacgctgcgccgtgaactggcactgcgcctgcatctgctggcacagggcgtgcgcgagatcgatatcgaagccaacgggctgatttttgccgttggcggtgacaaacggtggattggccgtggtggtgccaaaatggagcgtctcggctgacgcggttccgatggccagcgtgctcagcagcaggacggtgaggacttttctcatgctaattccctgtttggcgtcggggtggcctcgttatacgtcgcgccaccgctgtatgatgcgagcgattttgcgtcattcagccgggcggaaaaagcgattttgcccgttatgacgcttatttatacaattcagcggcgtagatggcgagaaaatgtccatttaaacaaaaaacgcaaaaaagtgatcgtcagggggttgcaggggcatcgaattctcgtataatgcgcctcccgtaacgacgcagaaatgcaaattacgacgccatcgaaatatggcaaaaaatgcagtaacgcgggaatagctcagttggtagagcacgaccttgccaaggtcggggtcgcgagttcgagtctcgtttcccgctccaaaatttgaaagcaccatcctgatcaaaggatttcatctcgcagatgcggggcgaaagccgaagattaagcgggaatagctcagttggtagagcacgaccttgccaaggtcggggtcgcgagttcgagtctcgtttcccgctccaaaatttgaaagacacaccacaccagtcgcagttttcaggttgctagacggtagcttgaatgacgatgattaagcgggaatagctcagttggtagagcacgaccttgccaaggtcggggtcgcgagttcgagtctcgtttcccgctccaaattttcttccatctcttatttatccacagtgcaatccagcgccggggatgattttcgtttggtcctcagaaatactgtgaacagagttatccacaggttatcgttccgtcactggcggcgcaaatgcttcgctttgtaaatagtatctttgtatgtgattgaaatttaacaaataaatttcatttcaaaatgttaatccgatcacttgaccttggtctgcgccttgaaacgcaatgtgttttagattttattcacagcctgtgaatgaatcaggcgtcgcgcggcaagcctttctctaccactctgaccagacgtaattttttcggcagctgtacttcaacggcgtcggcgttccgctttttcagttgctgggcaatcgcccactcaatgtgttcgtcgagaagcgggtgctcgccccggcggctctccagggcgcgaagatgggcttcatcccagggcgcattgcccaacgcgacggcgatattacgcagccagcgcaggtggccaatgcgacgaatcgccgacccttcggtcaccttcagaaaccacgcttcgctccaggcgaacagctccaccagcagcggggcatgcagcgctttgcgtgggctgaaatcctcttcatcggtgagctgtgagaaacggttccacgggcagatcagctgacaatcatcacaaccgtaaatacggttgccgattagtggacggaactcctcggggattgcaccttccagttcaatggtgagataggagatgcagcgccgggcgtcgacggtatagggctcaacgatggccccggtgggacagatggtcatgcaggcgacgcagcgcccacactcctccgcaaccgggctgtcgaccggcaggggcagatcaatcagcagttcgccgaggaaaaagaacgatccggcgtcgcggcttaagattagtgagtgcttacctgtccagccaaggcccgctttttctgcgattggccgttccaggataggcgcggaatcgacaaaaggtctaaaattgagcgaagcacactgttcctgaatcttctcccccagctttttcaggcgattacgtagcagcttatgataatcacgcccgagggcataacggctgacgtaacccagcgtgggatctttcagggtgcgggcaaaggcggcgttagcgggcagatagttcatccgcacgctgatgacgcgtaacgtaccgggcagcagttcgtggggacgggcgcgcatcataccgtgacgggccatccattccatttcgccgtggtattgtttatccagccatgcctgcagtttgggttcactggcgctgaggtcggtatcggcgatccccacctgctggaacccaagctctgtgccccattgtttgatttgttgcgctaactgaacgagatcgaggggctgtgacatgatggaccatacaatgacgaaaaaccctgacagtataccatacaacatttggcctgcggaggcgctgcgcctggccgaacgagaggcggcggacagcctggggctgacgctgttcgaactcatgcagcgcgcgggcgaggcggcgttccagctggccagctgtgcttatcctgccagcgcgcactggctgatcctctgcggacatggcaacaacggcggcgacggatatgtcgttgcgcgtctggcacaggccgcggggcggcgggtgacgctgctggcggtggagagtgacagcccgctgccggaagaggcgcaggcggcgcgggaggcgtggcttaacgccggcggcgtgatccatgcggcgaccatcccatggcccgacgatatctcactgattattgatggcctgctcggcaccggtctgcgcagtgcgccgcgcgatcccgttgcggcgctcatccaccaggcgaaccaccacccggcgccggtggtggcgctggatatcccttccggcctgaatgcgcagacgggcgcgacgccaggtgcagtggtacaggccgaccatacgctgacctttatcgccctcaagccggggctgctgaccggcaaggcgcgggatgtcgtcgggcaactccaccatcatgcgctggggctcgaacgctggctcgccggacaaagcactcctctgacgcggttttgcgccgcccacctcgccgactggctgccgccgcggcgggccacctcccataaaggcgatcacggcaagctggtgattgtcggcggcgatcgcggcacggcaggcgctatccgtatgtgcggtgaagcggccctgcgcagcggcgcgggactggtgcgagtacttactcacccggagaacgtggcgcccattgtcaccgtgcggccggaattaatggtagatgaactgacgccgcagactctgaaagccgcgctggagtgggctgatgtggtggcgattggccctggcctggggcagcgcgaatggggacgcagcgccctgcggacggtggaaagttttaacaaaccgatggtctgggacgccgacgcgctgaacctgctggcattcaatcccgataaacgtcacaatcgcgtgctaacgccgcaccccggcgaagcggcccgtctgctgaacgtcagcgtggcagaaattgaaagcgatcgcttactttctgcgcagcgtctggtaaaacggtatggcggcgtggttgtgctgaaaggcgcgggcacggtagtggccagtgaaagcggggcgatgggcattatcgatgccggcaatgccgggatggccagcggcgggatgggcgatgtgctcacaggcatcatcgccgcgttgttaggacagcacctgacgccgtatgatgctgcctgtgccgggtgcgtcgctcatggtgatgccgccgaccgactggccgcccgcgagggcacccgcggcatgctggcgaccgatctcttttccacgctcaggcgtgttgttaacccggatgtgattgacgtagaccatgattaaccgagtgattcctttacccgatgagcaggccacgctggcccttggcgaccgcatcgcgcaggcctgtaccggcgccaccgtgatttatctgtatggtgatttaggcgcggggaaaacgaccttcagccgcggctttttgcaggcgctcggtcaccgcggcaatgtcaaaagcccaacttataccctggtggagccctataccctcgagaacctgatggtgtatcacttcgatctctaccgtctggcggatcctgaggaactcgaatttatggggatccgtgattattttgccgacgatgccatctgcctggtggaatggccgcagcaaggcgcaggtgtcctgcctgacccggatgttgaaattcaccttgattaccaggcacaagggcgtgaggcgcgtattaccgcgatctcctcacggggtgaatctttactggcgcgtttagccttttagcctgaaggatgacgggatgaagtatcgcataaccacctggcttgccgctgcgctgatgctgtcgagtcttcacgccactgcggcgagtttatccgatatccaggtctctaacggagaccagcaggcccgtattaccctaagctttgtcggtgagccggagtactcctttaccccacagggtaaacgtctggtggcgctggatatcaagcagaccggcgtattgcagggactaccgctgcagtttagcggcagcaacctggtgaagagtattcgcgccggcacgccgcaggatacgcagacgctgcgtctgctggtggatctgacggaagatggcaaaacccgggcggtgaagcaacagaacggggcgaattacacggtggtctttaccatcaacgccgacgcgccgccgccgccgcctccgccgcccgtggtggtgaaacgggccgacccgccgccggtgatgccttcccggacgacgacgtcagggcgtaacccgttcagctcgtcgggtcatgaacggcagacggtgatgacctcctctcagccggcgatgaccaacaatcagaccgtgactcgcccggcggcccgcacggtgtcggcggatgataaagtcattatcgccattgatgccgggcacggcggccaggatcccggcgcgattggcccgaacggcaccaaagagaaaaacgtgactatcgctattgcgcgcaagctgcgggcgttactgaacgccgatccgcagtttaagccggtgctgacccgcgacggggattactttatttcggtgatgggccgctctgacgtggcgcgtaagcaaaacgccaatttcctcgtctctatccatgctgacgccgcgccaaaccgcgatgccaccggcgcctcggtgtgggtgctctcgaaccgtcgcgccaacagcgaaatggccggttggctggagcagcatgagaagcagtctgaactgctcggcggggcgggcgatgtgctggcaaacagccaggccgacccctacctgagccaggcggtgctggatctgcagtttggtcattcccagcgcgtcggctacgatgtggcgaccaacgtgctgagccagctgcagcgtattggcaacctgcacaaacgccgcccggagcatgccagccttggagtgctgcgctcgccggatatcccgtcgatcctcgtggaaacgggctttatcagtaacaacggcgaagagcggctgctggggagcgatgattaccaggagcagattgcggaggcgatttataacggcttacgcaactactttatgcagcatccgctgcagtcggcgcctcgcggcgaggcggcgcagaccgccagcgccgcggcgccgggcgggatgttgattaactaaggagcaggggatgccgattcaggttctgccgccgcagctcgccaaccagattgccgccggcgaggtggtggagcggcccgcgtcggtggtgaaagagctggttgagaacagtcttgatgcgggcgccacgcggattgacattgatatcgaacgcggcggcgcgaagctcattcgcatccgcgataacggcagcggcatcaaaaaagacgagctggcgctggccctggctcgtcatgcgaccagcaagatcgcctcgcttgacgatctggaggccattatcagcctcggctttcgcggcgaagcgctggccagtatcagttcggtggcgcgcttaacgctgacttcgcgcacggcggagcagcaggaagcctggcaggcgtatgctgaaggccgcgatcaggcggtgacggtgaagccggcggcgcacccggtcggtaccactctggaagtcctcgatctgttctataacaccccggcgcggcgcaaatttatgcgcaccgaaaagaccgagttcggccacattgacgaggtggtgcgccgcattgcgctggcgcgcttcgacgtcactatcaacctcagccataacggcaaggtgatgcgccagtatcgggccgtcgctcaggatggccagcgcgagcgccggctggggacaatttgcggcgccgcttttctcgaacatgcgctggcgatcgagtggcagcatggcgatctgaccctgcgcggctgggtcgccgatccgctgcataccaccccggcgctggcggaaattcagtattgctacgttaacgggcggatgatgcgcgatcggctgatcaaccatgctatccgccaggcctgtgaagacaagttaggggccgatcagcaaccggcgtttgtgctgtatctggagatcgatccccatcaggtggatgtaaacgtccacccggccaagcatgaggtgcgtttccatcagtcgcgcctggtgcacgactttatctaccagggcgtactgagcgtactgcagcagcagcttgacgcgccgctggcggaaaaagacgacccgccggcgccgcgcccgatgccggagaaccgcatcgccgcgggaggcaaccagtttgcgcggccagcggaagcgcgggaacctgcgacccgcttcagcatcacgccatcgcgtgagcctgcggcctccagcggcaaaccgggcggcgcgagctggccgcatgcgcagccgggttaccagaagcagcagggagcgctttatcgtcaactgctcgacacgccaacggcgccaaagccagcgttgcagcctccggcggcggcagagttggccggtcacagtcagagctttggcagagtgctgacgattgttggcggcgactgcgcgctgctggagcgcgagggcggtctggcgctgctgtcgttgaccgttgccgagcgctggctgcgccaggcgcagttgaccccgggagcggaggcggtatgtgctcagccgctgctgatcccgctgcggttaaaagttacggaaggggaaaagcaggcgctggccgccgctcagccggcgctggcgcagctagggatcgatgtgcataccgatgccctgcacgtgacggtgcgcgcggtccctttacccttaagacaacaaaatttacaaatcttgattcctgaactgataggctacctggcgcagcaaaacgcattcgacgtcggcaatatcgcccaatggatggcgcgtaatctgacgagcgaacagacgtcatggaatatggcgcaggcgattgcgctgctggcggacgttgagcgtctttgcccgcagctggtgagaacgccgccgggtggcctgttacaacctgtagatctccattcggcgatgaatgccctgaaagatgaatgatgtaaccgaggcgagcctgcccaaggcaatttttttaatgggcccgacggcctccggcaaaaccgcgctggcgatagccttacgtaaagttttgccagtagagttgattagcgttgattccgccctcatttatcggggaatggatattggcaccgccaaaccggatgctgcggagcttagcgctgcgccgcatcggctgctggatattttggatcctgcggaggcctattccgcggcggattttcgccgcgatgcgctggcggcgatggcggatattgtcgccgccgggcgaattccgctgttagtcggcggaacgatgttgtatttcaaagcgttgctggaaggattgtcgcccttaccgtcggctgacccagaggtcagagcgcggattgagcagcaggccgcagagcaggggtggaatgcgttacatcagcaattacaggagatcgatcccgtggctgctgcgcgtattcatccaaatgatccgcaaaggctttcccgggcactggaagtttttttcatttcgggtaaaactttaacggaactgacgcaaacgtcaggagacgctctgccatatcaggtgcatcagttcgccatcgccccggcgagccgtgaactgctccatcaacgcatagaacagcgttttcatcagatgttagcttcaggttttgaagcagaagtacgggcgctttttgcccgcggagatttgcatacggacatgccttccatccgttgtgtcggataccgccagatgtggtcatatctcaatggcgagatcccgtatgatgagatggtttatcgaggtgtttgcgccacgagacagttagccaaacgtcaggtcacctggctgcgcggttgggaaggtgtgcactggttagacagtgaacaacctgaacaagcgctcaacaaagtattacaggttgttggtgcgagccagaactgaacgtgtacaattaaacggtatcgtgcgtaattttttttgagaatcgtaaggttctgagtacaaaacaagcatacatataaggaaaagagagaatggctaaggggcaatctttacaagatccgttcctgaacgctttgcgtcgggaacgcgttccggtttctatttatttggtgaatggtatcaagctgcaagggcaaattgagtctttcgatcagttcgtgatcctgttgaagaacacggtcagccagatggtctataagcacgcaatttctactgttgtcccgtctcgcccggtgtctcaccacagcaacaatgctggcggcggttccagtaactatcaccacggtggtagcgcgcagggttcttctgcgccgcaacaagacagcgacgacgccgaataaggccagtgctgtttttccacgccggggagccaggttttctgcgttccccgctggtattttataaggggtttacgcttgtttgaccgttatgacgccggtgagcaggcggtactggtacacatctatttttcgcaagacaaagatatggaagatctccaggagtttgaaactctggcctcttccgccggtgtcgaagcaatgcaggtgattaccggtagccgtaaagcaccgcacccgaagtattttgttggtgaaggtaaggcagtcgaaattgcggaagccgttaaagcgaccggcgcttcggtcgtgctcttcgatcatgccctgagtccggcgcaagaacgtaacatggaacgcctgtgcgaatgccgggttatcgatcgcaccggtcttattttagatattttcgcccagcgcgcgcgcacccatgaagggaaattgcaggtcgagctggcgcagctgcgccatatggcgactcgccttgtccgcggttggacccaccttgaaagacagaagggcgggattggtttgcgtggcccgggggaaacccagctcgaaaccgaccgccgtttattgcgtaaccgtatcatgcagatcctgtcgcggctggaaaaagtcgagaaacagcgcgagcaggggcggcggtcgcgtgcgaaagccgatattcctaccgtgtcgctggtgggctataccaacgccggaaaatcaacgctctttaaccagatcactgccgccgaggtctatgccgcgaaccagctgttcgccaccctggacccgacgctgcgccgcattgacgtccctgacgtcggcgaaacggtgctggccgataccgtcggctttattcgccacctgccgcacgatctggtagcagcgtttaaagcgacgttgcaggagacgcgtcaggcgacgctgctgctgcatgtgattgacgcggcggatgtccgcgtgcaggaaaacattgatgcggtaaatacggttctcgctgaaattgaggccgatgagatcccggcgctgctggtgatgaacaaaatcgacatgcttgacgattttgaaccgcgcatcgatcgcgacgatgaaaataaaccgattcgggtctggctttcagcccagaccggggttggcgtaccactgctttttcaggcattaacggagcgtctttccggtgaagtggcccagcatacgctgcgcttaccgccgaaagaagggcgactgagaagccgtttctatcagcttcaggcgatagaaaaagagtggatggaggatgacggcagcgtgagtctgcaggtgcgcatgccgatcgttgactggcggcgcctctgtaagcaagagccaacgcttgttgactatgtggtttaaccttgcagcttgcctgaagatattgacccctgtggggatatcaaaaacaaatatggagcatatacatggcgtggaatcagcccggtaataacggacaggaccgcgacccgtgggggagcagcaaacctggcggcaactctgagggaaatggcaataaaggcggtcgcgagcaggggccgccggatctggatgatatcttccgcaagttaagtaaaaaacttggcgggctcggcggcggcaagggcggagtgggcggcggcaatagcgcgcaggggcctcgcggaccgatgggcgggcgtattgtcggcatcgttgccgcggcggcagtgattatctgggcggccagcggtttctataccattaaagaggccgagcgcggcgtggtcacccgttttggtaagttcagccatctggttgagcctggcctgaactggaaaccgacctttatcgataacgttcaggcggtgaacgtggagtcggtgcgcgaacttgcggcttccggcgtcatgctgacctctgacgaaaacgtggtgcgcgttgagatgaacgtgcagtaccgcgtcaccgatccggagcgctatctgtttagcgtgaccagcgcggacgacagtctgcgtcaggccaccgacagcgcgctgcgcggcgtgatcggcaaatacaccatggatcgcattctgaccgaaggtcgtaccgtgatccgtagcgatacccagcgtgagctggaagagacgattcgcccgtacaacatgggtatcactctgctggacgtcaacttccagacggcgcgtccgccggaagaggtgaaggccgcgtttgacgatgccattgccgcgcgtgagaacgagcagcagtacattcgtgaagcggaagcgtataccaacgaagtccagccgcgggcgaatggtcaggcgcagcgtatcctcgaagaggcacgcgcctataagacccagaccgttctggaagcccagggtgaagtggctcgctttgcgaagatcctgccggaatacaaagccgcgccggaaattacccgcgagcgtctgtatatcgaaaccatggaaaaagtgctgagccacacccgtaaagtgctggtcaatgacagcaaaaacggcaatctgatggttctgccgctggatcagatgctgaaaggcgccgctgcgccggcagcaaagagcgatagtagtgacgccagcgatctgctgcgcctgccgccagcatccagctcaagcagcgccagcacctcatcaacctcgagctcaaccgggggtagcattatggaccaacgccgcgctaacgcgcagcgtaacgactaccagcgtcagggggaataacgatgcgtaaatctgttatcgcgatcattgtcatcgtgctggtagtgctctacatgtctgtctttgtcgtaaaggaaggcgagcgcggtatcacgctgcgtttcggtaaagttctgcgcgacgacgaaaacaagccgctggtgtatgcgccaggcctgcacttcaagatcccgtttatcgaatcggtgaagatgctggatgcgcgtattcagaccatggacaaccaggctgaccgtttcgttactaaagagaagaaagacctgatcgtcgactcctatatcaagtggcgcatcagcgacttcagccgttactacctggcaaccggcggcggcgacgtctcccaggccgaggtactgctgaagcgtaaattctctgaccgtctgcgttctgaaattggtcgtctggatgtgaaagatatcgtcaccgactcccgtggtcgcctgaccctggaagtgcgtgatgcgctgaactcgggttcggccggtacggaagatgaggttagcaccccggcggctgacgacgcgattgctaaagcggcagagcgtgtggaagccgaaaccaacggtaaagtgcaggtgatcaacccgaacagtatggcggcgctgggtatcgaagttgtcgacgtacgtatcaaacagatcaacctgccggcagaagtgtcggaagcgatttataaccgtatgcgcgcggagcgtgaagcggttgctcgtcgccatcgttcacagggtcaggaagaggcggaaaaactgcgcgcgactgcggactatgaagtcaccaagacgctggcggaagccgagcgccagggccgtatcctgcgtggtgaaggtgatgcggaatcagcgaaactgtttgccgacgcgttcagccaggatccaggcttctactcctttatccgtagcctgcgtgcctatgagaagagcttccagagcaatcaggatgtgatggtcctgagtccggacagcgatttcttccgctatatgcgttcaccggattcggcgcgtaaataagccggagaaggtgtaaacctgaagtaataatgcgaaaaggcgcctgaaacaggcgccttttttcatgctgcgagggcgggaattagttgccgagtagcttgttcagcaggccgccgatcaccggcaggcctgccagcgcactttcgatggtgccgccgatagtcgacccaacgctttcgcccagggttttgcccaggtccggcgccaggtcggccagattgagggtgccaagcagtggcaggttaatgctcagggcatcagtgcccatcgtccatgcggctgcgccgaccttgctgcctaaggccgccagaccatcctgtaaccagcctgcgccgctcacattttcgatttcaaatgcggttaattctctcatcataatcttcctgattaagtagacgtaccgggttgtagtacgcgatggcatagttacaatttaaaaaatatccagcaatacaattagttgtgaattttgtttcacctttccggttcataatgaagctgaaatacgggacaatgtgaaatgagagaatgaattcaccatgctggccgagacgcccgcgagggcggcaatgatacttttcaattagggttgacgatgaactccaccatttggctggcgctggcgctggttttagtacttgaagggcttggcccgctgctttatccgcgcgcctggcgcaaaatggtcgccagcctgagccagctaccggataatttattgcgtcgttttggcggcggacttgtggttgccgggattgtgatctactacatgttgaggaaatcgattggctgatcaaaaagtggtcggatttgccttattttggatgcaaaaagtgctgtaactctgaaaaagcgatggtagaatccatttttaagcaaacggtgattttgaaaaatgggtaacaacgtcgtcgtactgggcacccaatggggtgacgaaggtaaagggaagatcgtcgatctcctgactgaacgggctaaatatgttgtgcgctaccagggtggtcacaacgccggccatactctcgtaatcaacggtgaaaaaaccgttctccatcttattccatcaggcattctgcgtgaaaacgtcaccagcatcatcggtaacggcgtcgtgctgtctccggccgcgctgatgaaagagatgaagggcctggaagaccgtggtatcccggttcgcgagcgtctgctgctctctgaagcctgcccgcttatccttgactatcacgtggcgctggacgtggcgcgtgaaaaagcgcgtggcgcgaaagcgatcggcactaccggtcgcggcattggcccggcttacgaagataaagtcgctcgtcgcggtctgcgcgttggcgatctgttcgataaagcaaccttcgccgataaactgaaagaagtgatggaatatcacaacttccagctggtgaacttctacaaagcagaagcggttgactaccagaaagtgctggacgatgtgatggcgattgccgacatcctgaccagcatggtggtggacgtatccgacctgctggatcaggcgcgtcagcgcggcgacttcgtgatgttcgaaggcgcgcagggtacgctgctggatatcgaccacggtacctacccgtacgttacgtcctctaacaccaccgcaggtggcgtggcgaccggctccggcctgggcccgcgttatgtggattacgtactgggcatcattaaagcttactcgactcgcgtcggtgcaggtccgttcccgaccgagctgtttgatgaaactggcgagttcctctgcaagcagggtaacgaattcggcgccaccaccggccgccgtcgtcgtaccggctggctggatgcggtcgcagtccgtcgcgcggtgcagattaactccctgtccggcttctgcctgactaaactggacgtcctcgacggcctgaaagaagtgaaaatctgcgttggctaccgtatgccggatggccgcgaagtgaccaccactccgctggctgccgataactgggaaggtatcgagcctatctacgaaaccatgccgggctggtccgaaaccaccttcggcgtgaaagagcgcagcggcctgccgcaggcagccctgaactacatccagcgtattgaagagctgaccggcgtgccggtggatatcatctctaccggtccagaccgtaccgagactatgattctgcgcgatccgttcgacgcgtaatcactctcaaggggcgccgttcgggcgcccttgtttttgctgttcgcccgccccatttcaaataaattagcggcctgagcgctggctggtttatcatcaataataatgatgtcgctcgacataccccgttttcttttccctgaggtttatgtgcagttaacgagtttcaccgattacggactacgcgcgctgatttatatggcgtcgctgccggaaggacgaatgaccagtatctcggaagtgaccgaggtctatggcgtctcccgtaatcatatggttaaaataatcaatcagttaagtcgcatgggctacgtgactgccgtgcgggggaagaacgggggcattcgcctcggcaaaccagcaggacagatccgcgtcggtgacgtggtgcgtgaccttgaacccttatcgctggtcaactgcagcagcgagttttgccacattacaccagcctgtcgtctgaaacaggcactagctgaagccgcgcagagttttctcaaggaactggataactatacgctggctgatttggttgagaagaatcaaccgctttataaattattgctggtggagtgacgccactctgccggagatgacaacggaggaaccgatatgtcacaagatccattccaggaacgcgaagctgagaagtacgcgaaccctatcccgagccgggaatttatcctcgaacatttaactaaacgggaaaagcctgccagccgcgatgagctggccatcgagttaaatatcgagggcgaagagcaaaccgaagcgctgcgccgccgcctgcgcgcgatggagcgcgacggtcagctggtcttcacccgccgccagtgctatgccctgccggaacgcctcgatctcctcaaaggaaccgttattggccaccgcgatggctatggtttcctgcgcgttgaagggcgcaaagacgatctgtacctgtcgtcagaacagatgaaaacctgtattcacggcgaccaggtgctggctcagccgctgggcgcggaccgtaagggccgccgcgaagcgcgcatcgtccgcgtcctcgtgccgaaaaccagccagatagttggccgttacttcaccgacgctggcgtcggctttgtcgtcccggacgacagccgcctgagcttcgatatcctgatcccgccggaagagataatgggcgcgcggatgggctacgtggtcgtggtcgagctgacccagcgaccaacccgccgcaccaaagcggtgggtaaaatcgtcgaagtgctgggcgacaacatgggcaccggcatggccgtcgatatggcgctgcgtacccatgagattccttatgtctggccgccggcggtggaaaaacaggtttccggtctcaaagaacaggtgccggaagaggcgaaggccggccgcgtcgatttacgctcgctgccgctggttaccattgacggcgaagatgcccgcgacttcgatgacgcggtgtactgcgagaagaaacgcggcggcggctggcgcctgtgggtagccattgccgacgtcagctactacgtgcgcccggggacgccgctggatgcggaagcgcgcagtcgtggcacctcggtctacttcccgtcgcaggtagtgccgatgctgccggaagtgctgtctaacggtctatgctcgctgaacccgcaggtcgatcgcctgtgtatggtgtgcgagatgacgatttcgtcaaaaggccgtctgaccggttataaattctatgaagcggtgatgagttcacatgctcgcctgacctacaccaaagtgtggcatatgctgcagggtgaccaggaactgcgcgaacactacgcgccgctggtgaagcacattgaagagctgcataacctctacaaagtgctggagagcgcccgcgaagagcgcggtggtatctcatttgaaagtgaagaagctaaattcatcttcaatgccgaacgccgtattgagcgtatcgaacagactcagcgtaacgatgcgcataagctgattgaagagtgcatgatcctggcgaacatctccgccgcgcgcttcgttgagaaggcgcaggagccggcgctgttccgtatccatgataagccaaccaccgaagcgattacctccttccgtaccgtgctggctgagctgggactggagctgcctggcggcaacaagccggagccgcgtgattacgcagagctgctaacctccatcgccgatcgcccggatgcggaaatgctgcagacgatgctcctgcgctccatgaagcaggcggtctacgatccggaaaaccgcggtcactttggcctggcgctgcagtcatacgcccacttcacctcgccgattcgtcgttacccggacctgtcgctgcaccgcgctatcaagtatctgctggccaaagagcagggacataaaggcaacagcaccgagaccggcggctggcactacagcatggaagagatgctccagctgggtcagcactgttcgatgaccgagcgccgcgccgacgaagcgacgcgcgaagtgtctgactggctgaagtgcgacttcatgcaggatcaggtgggcaacatcttctccggcgtgatcgccagcgtgaccggctttggcttcttcgtccgcctgaacgatctgtttatcgacggtctggtgcatgtttccagcctggataacgactattatcgtttcgaccaggtggggcagcgtcttattggtgagtccggcggccagacctatcgcctgggcgaccgcgtggaagtccgtgtggaagcggtcaacatggacgagcggaaaatcgactttaccctgatctccagcgagcgtgcgccgcgtaatgtcggcaagaccgcccgtgagaaagcgaaaaagagtacctctggcaagccgggcggccgtcgccgccaggtgggtaagcaggtaaacttcgagccggacagcgctttccgtaaagagaaagagaccgcccgaccgaagaaagagaaaaaagcgaaaaaaccgtcggcgaaaacacagaaaatcgccgccgcgacgaaagccaagcgcgcggccaagaagaagatcgccgagtgattgacctcccttcaccctgaagtctgctgacgcaggatggggtgaagggggcagataacagaacctaaaacgagtacatcaatgagtgaaatgatttacggcatccatgcggtgcaggcactgctggagcgcgcacctgagcgttttcaggaagtttatattctgaaaggccgtgaggataagcgcttgctgccgctgatccatgccctggaagcgcagggcgtggtgattcagctggccaaccgtcagtttcttgatgagaagagcgaaggcgctgtgcaccaggggatcattgcccgcgtgaagccggggcgtcagtatcaggagaacgatctgccggatctgctggcgcagctcgatcaaccgttcctgctgatcctcgacggcgtaaccgatccgcacaacctcggcgcctgcctgcgtagcgctgacgccgccggcgtgcatgcggtgatcgtgccaaaagatcgttccgctcagttgaatgcgacggcgaagaaagtggcctgcggcgcggcggagaacgtcccgctgatccgcgtcaccaacctggcgcgcaccatgcgtctgctgcaggaagagaacgtctggatcgtcggaaccgcaggggaagccgaccatacgctgttccagagcaaaatgaccggcccgatggcgctggtgatgggcgcggaaggcgaaggcatgcgtcgtctgacccgcgaacactgcgatgagctgatcagcatcccgatggcgggcagcgtctcctcgctgaacgtctcggtggctaccggcatctgtctgtttgaagcagtacgtcagcgcagctaagctgaaccatcgacgaatcaaaaaaagccatcctccgggatggcttttttgtgaccgctctcgcgggcgagtatccctccggataaccatacttatggctatcgccattgatggagggagacacgatgcactggcaaacgcacaccgtttttaatcaacccaccccgctgaataacagcaatctgtttctgtccgataccgctctgcgtgaagcagtggtccgcgaaggcgccggctgggatggcgatctgctcgccagcattggccagcagctggggacagccgaatcgctggagctgggacgcctggccaacagcaatccgccggagctgctgcgctatgacgccaccggcgcccggctggacgacgtgcgctttcatcccgcctggcacctgctgatgcaggggctgtgcgcgaatcgggtacataacctcgcctggcaggaggatgcccgcgaaggcgcgtttgtcgcccgcgccgcccgctttctgctccatgcccaggtggaggccgggacgttgtgtccgattaccatgaccttcgccgcgacgcccctgctgcagcacgccctgcccgcgccctttcgcgactggctgtcgccactgctgagcgaccgttacgatccgcaccttgcgcctggcggccagaagcgcggcctgctgatcggcatggggatgaccgagaagcaaggggggtctgatgtgctgagcaataccactcgcgcggagaaaacggcggaagggttttaccgactggtgggacacaagtggttcttctcggtgccgcagagcgatgctcacctggtgctggctcaggctccggcggggctctcatgcttctttgtgccgcgtctgctgcccgacgggcagcgtaacagcgtgcgtcttgaacgcttaaaagagaagctcggcaaccgctccaacgccagtagcgaagtggagttttatgaggcctgcggctggctggtgggcgacgaaggcgacggcgtgcggcagatcctcaggatgggcggcctgacccgctttgactgcgcgctgggcagccatgccctgatgcgtcgcgccttctcggtggcgctgtatcacgcgctacagcgtcaggcgtttggcaaaaacctggtcgaacagccgatgatgcgccagctgctggggcaaatggcgctccgtctggaggggcagaccgcgtttctgtttcgcctggcgcgggcctgggaccgtcgggatgatgcccgggaaagcgcctgggcgcgcctgtttacgcctgcggccaagtttgccatctgtaaggccggtatcccgtttgtcgccgaggcgatggaagtgctgggcggcatcggctattgcgaggagagcgaactcccgcgcctctaccgtgagatgccggtcaacagcatctgggagggctccggcaatattatgtgcctcgatgtgatgcgggtgctgagcaagcagccggcggcgatggagctgctggccgcggagtgtgcggaggtgaaaggacagaaccgccatctcgaccgcgcatggcgtcagctgcagcaactgctgaaacgacccgccgaagagcaggggagagagattgcccggctggtctatcgtcttggcgcgggggcgcagatgctgcgccatgcttcgccgccgctggccgaagcctggtgccggatgatgctcgacacccgcggcggcatacgtcttgacgcgccgaccctcgacgacctgctgctgcgggctatggggcgcgggcgccaggcgcctcaggcgtagagaatggcctgcacgcgccagctgtccggctgttgttcctcgtacatctgaataatgcgataccaggaggcgccttgctcgtctgctttgcgggcaatggcgtgctctacatcctgttggctaccggaaagattagtgacggagatcagaccgatttcattcaggccagtgacgcaatccgcgctggcgaattcggctgactgcgcggacgtattggccgtcgcagcggttaacagcaggctggatagggtaaaagatcgtttcatcgtcagctccatttcacgtagtcccaagggcagtccgttgctaacgtcctgccaggtggctggccgaacgttattatgcacaggagaacgtgaatggacgcaaagctgtgtaaagcagatttaaagacgccgcctcgttatcgacgatagaggatcgcctgcgaataccactggccgggtaccatggtgtcatcgatcatgatgatgacgtagtaatcggctttggccgcttctgctttggccttcagcgccgcttcgacatccatcggcgaaccgtacatcagtacgcttaccgtggccattttctgcaggccagccgtctggtagcgctggatctcctgcggatggtcggtggcgggcggcggggcttccggcgttccctgcagggcgctacacccgctgaggacgatagccagtaaccacggtgaaaacctgcgcataaccatatctcgtttcctgatagtgatagtgtagtggtagccttaacaggattgccggggaatgttcccgaactgttatctctgacgcgattttcgaatgaaaatgttgtgaaagcgtaaccgggttctcaacattatgaatcgtagcaaactgggttgcctggtgaatgaattttcccatgacgcctaaccacgatagagaaggaagacgataaatgattgcactagaaatgcgcaacctcggcggtggtgaaattttacatgcctgtccgcaggagagtctggataagcccttgccctgtatcgtcttttatcatggctttacctcgtcgaagctggtctacagctactttgcggtggcgctggccgaggccggattccgggtgatcatgccggacgcgccggagcatggggcgcgctatcagggcgatgaggccgggcggatgcagcgcttctggccgattctgcagcagaatttcagggagtttcctgcgctgcgcgaggcgataatcgctgaaggatggctggaaggggagcggctggcggtggcgggcgcttcgatggggggaatgacggcgttgggcatcatgacgcatcaccccgagctgaacagcgtcgcctgtctgatggggtcgggctattttcgttccctgtcgcaaaccctgtttccctcgcctggctttgatgctgacagtctccgcgaatgggatgtcagccatcagctggcgtcccttgcccggcgaccgctgctgctctggcatggcgatgccgatgacgtggtgccgccggaagaaacctttcgactagagcaggcgctccggcaggctgaccttgccgccaggctgacctgcgtctggcagaaaggcgtccgccatcgcattacgccagaggcgctggctaccacggtcgccttttttcagcagcacctttaaacgcggattacgctgaggccctgatcctcaagctgtttgaggatcgcggcatcggcctgtttgccggtgatcaccacgtctatttgtccggcctggctgaatagcatcccggcgcgctcgccgatcttgctgctgtcgaccagcaccgccagtttgccgaccacgttaagcattttttgctcggccatggcggtcaacatatccgttttgtagaggccttcggcggtgagccctttgccgctggtaaacatccagtgtccggcatagaggctgttctcgctaccgtgggggctgagggtgatggcgtggctgcggttgtactggccgcccatgataatcacgctgtcatgctcctggtcgatcaggtagttagccagcggcagatagttggtgatgatctgcaccggtttgccgcacagttcccgacccaacagaaaggcggtggagccgcagttaatgacgatgctctcacccggcgcgatcagttgcgaagcggcgcgtgcaatacgcactttttcatccagattttgcgcctggtggatgttcatcggcgtccagcgggggcgctgttcgctaatggcttccgcgccattacgaacctttttcagtttgccgctttcatccagcttgttgatatcacgtcgggcggtagcgggtgagatcccgagccgcgacatcacctgctccacggtaacaaaccccgtttgggcgagcagatccagcagaatttggtgcctttgcgcttccgtcatgagcgaatccgattaaaagtgaacagcaaagatgatatttgaaatcatgtgaaaatactaaccctgcggcggggtatttccggcaggcagggcctgccggcggcgacttacaggaaggatttgaaaggcagatccggctcaatggtgaagcaatcgtcgaaaccgcgcgggtagtgatattcgaaattgtctttatccagcggccaggtaaatttgccgccgacctgccagataaacggcttgaagccgtacttcagacgatcctttttcatctcccacagaacgcggatctcctgcggatcggcctgaaagtttgaccagatatcatggtggaacgggatcacaactttggcgttgagcgactctgccatgcgcaggatatcggcgctggtcattttgtcggtgatcccgcgcgggttctcgccatacgagccgagggcgacgtcaatccgatgctcgttgccatgcttcgcgtagtagttggagtagtgggaatcgccgctgtggtacaggttgccgcccggtgttttaaacaggtagttgaccgcgcgctggtccatgccgtccggcagtacgccagcggctttttggtccgccgggagggtgatcagcgcggtgcgatcgaacgcatcgagcgcatggatctcaatgtctttgatcttcacgacatcgccaggtttcatgacgatacagcgcgctttcggcacgccccaaccgatccacaggtcgacgcaggttttcgggccgataaacggcacatcggccgggcagttctgcatgacggcggcggcgacgttgacgtcaatatgatcgttgtgatcgtgggtcgcgaggaccgcgtcaatctggcgaatggcgaacggatccagcacgaacggcgtggtgcgcaggttaggctgtaattttttcacgcctgccatccgctgcatctggtggccggttttcatcagcggattgccgtggctctgtttgccagtgccgcaccagaaatcgacgcagacgttagccccgccttcggattttaaccagataccggtacagccgagccaccacatggcgaaggtgccgggcgtaacctgctcctgctcaatctcttcattcagccagctgccccattccggaaaggtgttcaggatccatgattcacgggtgatggtctgtactttactcatcgtgctcttcctcgtattttcaatagtaatcaaattttgattggttttgatttatgttgtcactggattttcaagattgcaatcttgttttccatcaattttacgaagagatgcgcatcacctctcaggggttccagcattcataaaggttgtgctttgttttatctatatgatttgaaaatgtttaattatgtttcggcgctactgctcggcaatagtcacaatgaaatagaggattattgcggcgcgcgtcacatttaatcaaattcaatcttgttgtgattatttttgattattagagtgggcagcgagaaatgctgagcgtaaggcgcgttcagcgccttcaccatcgggagtgtgttatggcaatcctctacaacatctttaccgttttctttaatcaggtgatgaccaatgccccgctgctgctgggtatcgtcacctgcctgggctatatcctgctgcgcaaaagcgtcagcgtgattattaaaggcacgatcaaaaccattatcggcttcatgctgttacaggccggctccggcatcctcaccagcacttttaaaccggtggtggcgaaaatgtcagaggtgtacggcatcaacggcgcgatctctgacacctatgcctcgatgatggcgaccatcgaccggatgggcgaggcctatagctgggtgggctatgcggtgctgctggcgctggcgctcaacatctgttacgtcctgctgcgccggataaccggcatccgcaccatcatgctgactggccatatcatgtttcagcaggcggggctgatcgccgtctcgttctttatctttggttacggaatgtggacgaccatcatctgtaccgccgtgctggtctccctgtactggggtatcacctccaacatgatgttcaagccgactcagctggtcaccgacggctgcggcttctccatcggtcaccagcagcagtttgcctcgtggattgcctacaaagtggcgccgtatctggggaaaaaagaggagagtgtggaagacctcaagctgccaggctggctcaatatcttccacgacaacatcgtttccaccgcgattgtcatgaccattttctttggcgcgatcctgctttcctttggtattgacgtcgtgcaggcgatggcggggaaaacccactggacggtctatatcctacagaccggtttctccttcgcggtggccattttcatcattacccagggcgtgcggatgttcgtcgccgaactgtccgaagccttcaacggtatctcgcaacgcctgatccccggcgcggtgctggcgattgactgcgccgcgatttatagctttgcgccgaatgcggtggtgtggggctttatgtggggcaccatcggccagctgattgccgtcggcattctggttggcattggctcttcaattctgattattccgggctttatcccgatgttcttctccaacgcgacgattggcgtctttgccaaccacttcggcggctggcgcgcggcgctcaagatctgcctggtgatgggcatggttgaaattttcggttgcgtgtgggcggtgaagctcaccggtatgagcgcctggatgggaatggcggactggtcgattctggcgccgccgatgatgcagggcttcgcctccatcgggctggcgtttatggccgtcatcatcctgattgctctcgcttatatgttcttcgctggccgcgcgctgcgcgccgaagaagacgcggaaaaacaactggcagaggcctctgcccaataaggaattctgattatgaccgtacgtattctggctgtgtgtggtaacgggcaaggcagttctatgatcatgaaaatgaaagtggatcagttcctgacgcaatccaatatcgaccacacggtgaacagctgcgcggtgggtgaatacaaaagcgaactaaacggcgcggatatcatcatcgcttcaacccatatcgcgggggagattaccgtctccggcaataaacacgtggtgggggtgcgtaatatgctttcccccgcggatttcgggccaaagctgctggaggtgattaaagctcatttcccgcaggacgtgaaataaggagcggccatgaaactccatgaatcactggcgcagaatcactccattcgcctgcaggcggaagcggaaacctggcaggaggcggtgaaaatcggcgtcgatctgctggtggccgccgacgtggtggagccgcgctactaccaggcaatcctcgacggcgtcgcgcagcacggcccctattttgtgatcgctccgggattagccatgccgcacgggcggccggaagagggcgtcaaaaaaaccggctttgcgctggtcacgctaaagaaaccgctgattttcaaccacgaagataacgacccggtcgacatcctgatcaccatggcggcggttgacgccaccacccaccaggaagtgggcatcatgcagatcgttaacctgtttgatgacgaagccaatttcgaccgtttacgcgcctgccgcagcgagcaggaagtgctggatttaatcaaaaacgccaccgcggcggctgtttaaaaggaacactatcatgtcattacctatgttacaggtcgccctcgacaaccaaacgctggccagcgcttatgaaacaacccgtctgatcgccgaagaggtagatatcattgaagtcggcactatcctctgcgtcggtgaaggtgtacgcgcggtgcgcgatctgaaagcgctgtatccgcataaaatcgtgctggcggacgccaaaattgccgatgccggcaagatcctgtcgcggatgtgcttcgaagccaacgccgactgggtcacggtgatctgctgcgccgatatcaacaccgccaaaggggcgctggatgtcgccaaagagttcaacggcgatgtgcaaattgagctgaccggcttctggacctgggagcaggcgcaggcgtggcgcgaggcgggtattcagcaggtggtctatcaccgcagccgcgacgcgcaggcggcaggcgtggcgtggagtgaggcggatatcagcgcgattaagcgtctgtctgatatgggcttcaaagtgaccgtcaccggcgggctggcgctggaagacctgccgctgtttgccgggatccctgttcacgtctttattgccggacgcagcatccgcgatgctgcctcgccggtggaagcggcgcgccagtttaaacgctctatcgcccagctgtggggttaaggagcgactatgttggcgaaatccattccgctcggcatctatgaaaaagcgctccccgccggggagtgctggctggagcggctaaagcttgcaaaagcgctgggctttgatttcgttgagatgtctctcgatgaaacggacgcccgccttgcgcggctggactggagcccggagcagcgtctggcgctggtcaaggcggtggctgaaaccggcgtccgggtgccgtcgatgtgccttagcgcccatcgccgttttccgctgggtagtgaagacgacgcggtgcggcatcaggggctggagatcatgcgtaaagccatccgcctggcgcaggatgtggggattcgggtgatccagctggcaggctacgacgtctattaccagcaggcgaacgatgagacgcgccgccgctttcgcgacggcctgaaacagagcgtcgagatggccagccgagcccaggtaaccctggcgatggagatcatggactacccgctgatgaactcgatcagtaaagcgctgggctatgcccattacctgaataatccgtggttccagctttacccggatatcggcaatctgtcggcgtgggataacgacgtccagatggagctgaaggcggggagcgggcatatcgtggcggtacacgtcaaagacacgaagcccggcgtctttaaaaacgtgccgttcggcgaaggggtggtcgattttgaacgctgcttcgaaacgctcaagcagaccggctactgcggcccgtacctgattgagatgtggagcgaaaccagcgctgacccgctggcggaggtggcgaaggcgcgtgactgggtgaaggcgcggatggcccgcgcgggcctgatggaggcggcataatgcaacagctgaaacagcaggtgttcgaggccaatatggatctgccgcgctacggcctggtgacctttacctggggtaacgttagcgccattgatcggcagcgtgggctggtggtgattaagcccagcggcatcgcctacgagtcaatgaccgtcgatgacatgtcggtggttgatctgcaggggcacgtggtggaagggcgctggcgtccctcctctgataccgccacccatctggcgctctatcgccgttatcccgaccttggcggggtggtgcatacccattcgacgcacgccaccgcctgggcgcaggcggggctggcgatcccggcgctcggcaccacccatgcggactacttcttcggcgatattccctgcacccgggcgcttagcgcacaggaggtggacgaggcctacgagctgaacaccgggcaggtgattatcgaaacgctgggtgaggccaatccgctgcatacgccggggatcgtcgtctatcagcacgggccatttgcctggggcaaagacgcccacgaggcggtacacaacgcggtggtgatggaagaggtggcgcgcatggcgtggattgcccgcggcattaatccgcagttgcagcccatcgatagctggctgatgaataagcattttcagcgtaagcatgggccaaacgcctactatgggcaaaagtagatagcgcgctccggggctttcacccctcacggtgaagcaactggtctggccccggagccgtttttaatcctgacgataggccgacggcatcacgcgcatgccgatgagcgtgaccacgcaaattatcgccccggcgtaaaacgtcgaggcggcgccgaaggtttcccacagtacccccgcgccggtgctggccagcagcagagccaggccactcatcagattaaacataccgaacgccgtgccgcgtagctccggtggcgccgtatgggcgaccatcgccgccagcaggccctgggtcattcccatatgaatcccccacagcgcgacgccgatcagcagcgtgctccagtggctgctgagcgccagcacgatatcggcgaggatcaacaccagcagcccccactgcagcagtttgctgtggctcatgctgtctgagagtttaccgaacgggtaagccgtgaggctgtagaccaggttcatcgccaccatcaccagcgggatggtatagagcgggatctccatctgctgggcgcgcagcaccagaaaggcttcgctgaagcgggcgagggtgaaaatgctgccgatcgcgaccacccaccagtaggcggcggagagctttttcaggttttcgcgcttcagcggattgctgcgtttgtgcgcgatggcggattttggctcctgtaggccgaatccgagcaggagaatggagagcacggcgggaatgaccgccacccagaaaatagcgtgaaaatcgttggcccagataaacatcagcagcaccgccagcagcgggccgagaaaggcgccgacggtatccagcgcctggcgtagtccgtaggcggcgccgcggatctccggcggggtgacatcggcgaccagcgcatcgcgcggcgcgccgcgaatacctttgcctacgcggtcaatcatgcgggcgctaaacaccaccccggcggtaggggcgatggcaaacagcggcttactgagcgcgcccaggccgtagcccagcagcgccagtcctttacgcttgccgacatagtcgctgattgcgccggagaagaccttcaggatcagggcggtggcttccgccagtccctcgataagaccgataattatcacgctggcgccgagggtagtggccataaacagcggtaagaggctgtggatcatctcggaggagacatccatcagcaggctgacgccgccgagtacccaaacgcctttggggatacggcctaaggtggcgaaacgcggaaccatcaatcactcctgattatcaaatggcgagtggctgattaaatcaggttgcgatgacgctggtaagtcggtttgtaaaataattctcaattgcgtttaggcgcagacctcgcttcgcccctcgcgaggagaggcgaagaatcgggcaggcgttagcggtatatcaccgcgctggcgcgaagcgggccgttggtttcgggttcgtgcatcaggataggctgaaagtatttcgccccctgcgcatcgctcatctggctaagggcctgttcggcctcgtgctcagtggccatattgtgattgatatagataacgccgaggctctgcacgtcgtccatgttgcgggcctgacgttcggtgatttggatagctgccagcgcgttggcgctgaagaaaagcgcagccatcatggcgatgattttcagtttcatatactacgctcctgactgacagtcctgacgctgactcggggctctcctgtggtcgttaggctttgatataagtgtaatcgctgcgcgttcatcgcatggcgaccttttctgatgcagttgttcaaaaaaatgccgcttcctttattggttaattttaaatcacccacttagcccagcttggcgcttagtgcgaattatttgtgcaaatgcgcttgtgttcctgaggggccgccattagaatgacgcgtcaatttttcagccgccctttaacacgttccttgcctccatgggccgcggctgacccagacaggaggctgaataatccgtaaggagcaattcgatgcgtcattacgaaatcgtttttatggtccatcctgaccagagcgaacaggttccgggcatgatcgaacgttacactggtgcaattactgcagcagcaggtacgatccaccgtctggaagactggggccgccgtcagctggcttatccgatcaacaaactgcacaaagctcactacgttctgatgaacgttgaagcgccgcaggaagcgatcgatgagctggaaactaacttccgcttcaacgacgccgttatccgcagcatggtaatgcgtactaagcacgctgttaccgaagcatctccgatggttaaagcgaaagacgagcgccgtgagcgtcgcgaagatttcgccaacgaaaccgcagatgattctgaagctggggattctgaagagtaatcctgatgaccaaccgtctggagctgtccggcattatttgcaggactccacttcgtaaggtcagcccgtcaggaattcctcactgccagttcgtgcttgagcatcgttcagtgcaggaggaagccggttttcaccggcaggcatggtgtcagatgcccgttattattagcggtcatgagaaccaggccattactcacagtataacggtcggtagcgcagtaaccgttcgagggttcatctcttgccataaggcaaagaacggcttgagcaaaatggttctgcatgccgagcagattgaattgatagattctggagactagccatatggcacgttatttccgtcgtcgcaagttctgccgtttcaccgcggaaggcgttcaagagatcgactataaagatatcgctacgctgaaaaactacatcaccgaaagcggtaagattgtcccgagccgtatcaccggtacccgtgcaaaataccagcgtcagctggctcgcgctatcaaacgcgctcgctacctgtccctgctgccgtacactgatcgtcatcagtaatcggtcacggtccattaatacgactttgagaggataaggtaatgcaagttattctgcttgataaagtagcaaacctgggtagcctgggtgatcaggttaacgttaaagcgggctacgctcgtaacttcctggtcccgcagggtaaagctgttcctgctaccaagaaaaacgttgaattcttcgaagcacgtcgtgctgaactggaagccaaactggctgacgttctggcagcagctgaagctcgtgctgagcagatcaacgccctggaatccgtaaccatcgcgtctaaagctggcgacgaaggtaaactgttcggttccatcggtactcgcgacatcgctgacgctgttactgcagcaggcgttaaagttgctaagagcgaagttcgcctgccgaacggcgttctgcgtaacgttggcgagcacgaagtgaacttccaggttcacagcgaagtattcgctaaagttatcatcaacgtggttgctgagtaatcggcctctgacgttctggtaacaacaaaccgccggccttgtgccggcgttttgctttttagcgcctttcattttgcggcggcgtaacgcttgctgtcgtcttctctgctatcgcgcacgcacaaagctgccgttcgactggcgggtaaacagcacctgctggccgttgccggtatcgatagtgagcccggtgaccacgccgttggcgttctgccgaatctgcaccgtctgtccgctctgcaaagtacttagcggcttgccagcgccttcaacctgcgccatggcgtagacgtcagtggccggcagcccatgatcgcggaacagctgcgccagggttttgcctgactcgatgcgataggtccgccattgctgctcaatacccggcgcggactgctgtgatgaggattgataaggctgggaggcggcgggctgctgcgtctgcgcctgatccggctgctcatcctgaatcggctccggggcgaccggcgccatctgatcggcgtcgctcacggtaggcgtattagtgatcggcggcagcggaacggcctgattgccgccagcttgcggctgggactgcgactgtaggttcaggttcgcttcacggctggtggacgccgggctttggctatcatcggagggaagcagaataccgataataaccaacaggaagccagcgataattccccggcggtgcatcggaggcagcgggtccaggaggcgaaaatgatccggggcgtgccagattttcgccagggtagatgtcagttcaaagcgcccgggcatggctttcctcctgctccgcatatttatatcctgctcatgagtatagatggctaacgtcctgatgaccggaacaaagtgaagttaacctgctgccgcctattgtttctttttcgctgagatttgtcatcatccgccgacaaagttttacccatttcgctatggctgttatgctttcgcacgcttttatcttgatgtttatcacccaaaaaggaacaacgatggcaaccccaacttttgacactatcgaagcgcaggcaagttacggtatcggcttgcaggttggacaacagctgagcgaatccggcctgcaggggctgctgccggaagcgctggtggcgggtatcgccgatgcgctggaaggtaaccagccgcaggtgccggtggaagccgttcaccgcgcgctgcgtgaaatccacgagcgtgctgacgctgtgcgtcgcgagcgttttcaggccatggccgctgacggccaaaaataccttgatgaaaaccgcgagaaagagggtgtgaacagcaccgagtctggtctgcagttccgcgtactgacccagggcgaaggcccgatcccggcgcgtactgaccgcgttcgcgtgcactacactggcaaactgatcgacggcaccgtcttcgacagctccgttgctcgcggtgaaccggctgaattcccggtgaccggcgtgatcggcggctggattgaagcgctgactctgatgccggtaggttccaaatgggaactgacgatcccgcacaacctcgcctacggtgagcgcggcgctggcgcatcgattcctccgttcagcaccctgatcttcgaagttgaactgctggacattatctaaacagcagcggcttcctcttccccgcggcaggggaagccataaaaatagcgtaaaatccttaagttaaaaattaattggaattatgttttgcattcatcacgtatgggtgtatttttgtgagctatttcgcgttagatgagtgatataacactcactttaaacataaaattaacattatatctaaatcatagtattcatccctccgattcttacctaatatcgactagcccttgctggggttaatgacagacgacgggccatcagagcctgaacaacacagacaggtacaacaggaagaaatcacatggtagatcaggttaaagtcgctgctgtcgagcaggagccgactgaacaatcgctacggcgaaatctcacaaaccgacatattcagctgatcgcgattggcggagcgatcggcaccgggttatttatgggttctggcaaaaccatcagccttgccggaccatccattatctttgtttatatgattatcggttttatgctgtttttcgtgatgcgtgccatgggcgaattactgctgtcgaacctcgaatataaatcctttagcgacttcgcggccgatctgctggggccgtgggcgggctactttaccggctggacctactggttctgctgggtagtgaccgggatggcggacgttgtcgccatcaccgcctacgcgcagttctggtttcccggactctccgactgggtcgcctcgctggcggtgatcctgctgctgctgggcctgaacctggccaccgtcaagatgtttggcgaaatggagttctggttcgcgatgatcaaaattgtcgccatcgtggcgctgatcgtggtcggcctggtaatggtgatgatgcatttcaaatcgccgaccggggtcgaagcctctttcgcccacctgtggaatgacggcggctggttcccgaaagggctgagcggcttcttcgccggcttccagattgcggtgtttgccttcgtggggattgagctggtgggtaccaccgccgccgaaaccaaagacccggaaaagtccctgccgcgggcgattaactccatcccgctgcgtatcattatgttctacgtcttcgcgctgattgtgattatgtcggtgacgccgtggagctccgtggtgccgagcaagagcccgttcgttgagctgttcgtgctggttggtctgccggcggcggcgagcctgatcaacttcgtggtgctgacctccgcggcctcctcggccaacagcggcgtgttctctaccagccgtatgctgttcggtctggcgcaggatggtcaggcgccgaagatgttcgccaagctgtcgaagcgtgcggtgccggcgaagggcttaaccttctcctgcatgtgtctgctgggcggggtggtgatgctgatggtcaacccgagcgtgattgccgccttcaccatgatcaccacggtgtcggcgatcctgtttatgttcgtctggaccatcatcctttgctcttacctggcgtatcgcaaaaaccgccctcagctgcatgagaagtcgagctacaagatgccgctgggtaaagtcatgtgctgggtgtgcatggccttcttcgtctttgtgctggtgctgttgaccctggaagacgatacccgtgaagcgctgatggtcaccccgctgtggtttgtgctgctgggcgcgggctggctgtttgccggcaaaaaacggctggcgaaataaacgaaaattttaacgttgcttgcaacggcccgtcataaaaaagaccacccggagtggccaaataagacggacaatgtcgagggcgcccgcgggcgcctttttctttactttccgccgagggcgcgcgggaacagcacattattttccaggctgatgtgttccatcagatcgtcgatcatctcgttgataccgttatacatcgccttccaggtggtacaggcttccggcggcggcgtcacgttgtgggtgatgtgcttaatgacttccagcagttcacccgcttcatcatgctcgctttccatcacgctgatcggccccccggcctgggcgcccattccctgtttgatcatcgggaacaggatctgctcctctttcatcatgtggctggaaagctcctgatgcagcatggtcaggtacttagtcagtcctttcggcacgttcggtttatcggcatggacgcgttcaaccttggtggcctgcaggatcagctccggcagctgttcacggtgccggtcgtgatagcgaacgatgatatggtcgataatctccgcgaggggcgccgcgcgccagtcgcgggagagaggctgttcggccagtttcgccagctcggcttcaatcaccgcgacatccagcgctttgcgcgacgcggcgcgcgccagggtctgtttgccgccgcagcagtaatccatatcgtattgacggaacagggcggaggcgcgcgggatggtcagcgccagctcgcctaaaggttggtcacggaaagccatagcagttacctcgtcatcaggaatataagatgtattttaaatgcatctttttggcgagggaataccccttaaggaggcgaggctactttttttcgtccgccagcggctgcagcatcggtttttccggtctggcgcgtacggcagagaccacgccgagcaccagcagcaggatcccgctcagggtcagcagcggcggtaagctttgccgcagcaggaaggtatacagcagtccggccagggtttcgaagacgataagcgggccgaggatcaccgtcggcagccgctggctggcaatattccagcatagcgcgccgacccatgagcagagcaccgcgatggccagcatcagcgtaataaacaccgcaggacgcgggccgaagggcaggggaaacccggcctgctgaccgtgcagccaggcgcaggcggcgagatagccggccagcgaaaccggaagcgtcaccagcgcctgagcggtagcccacatcattggcggttgatgcgggttctcccgcagccagcgggcgttgcgcagggcataccaggcccagcagaccaccgatcccagcgccagcgcaatgccggagccgtagcgccacgggctaaaattcggcagcccctgacgcagctccgcgacgttaacgcagatcaggcccacggcgatgcagatcagcgccggaaacaggcgccgccacggcagcttcccgtcgcgctggctgtagagcagattggcgaacaccggcagtaccaccggcagcgtgccgataatcatggtggaaaccggcgccccggtgcgctgaatggcgctggccaggcagacgtaatagataaggttccccatcattgtcaggcccagcgcggtccaccagtcgtgccggctcaactggcgcagtcgcgcgcgcccgagccacgccagcggcagggcgatcaggcccagcgccagatagcgtcccatcgactgcagcatcgccggatactctggcaccagcaaaggcccgacgaaaattaaaccccacatcagccccgccagcagggcgtataacacaccactaatcatcattgcatccgttgtcattaccgttgtctgcagtgtagaagggggccgggcaggaatattgtatgagattgcgcattagcgcctggcgacctgcttctgatagcgcaccggcgtaatgccgtaacgctgggtgaaggcgcgggtcaggtgggactggtcggtgaggccgacggctatcgccacttcggcggcgggcatgccgtgggtgaggaacgctttggcgcgccacagacggatggccatcagcatctgatggggcgttacgtgatagtgggctttaaactggcgctgaaagtggtacgggctcagcgccgccacctgcgccagctcgtcgagggtgatgggacgcatatagttatcgtgcaggtagtcgcgcacgcggtcaaagcgatgcccggcctcaccttgcgcagaggcatggtgggccagagggcggaaggcgtcgatgaggtcgagcagcagtccctgctgggccagcggatcgtcgctatgccacaggccataaatcagctggccaatctgtcgggaacgtagaggatcctcgcggaccacctcgctgaaccaccagtctcgcaccccggtgatggcttcaagacggtccggctccagataaatcatccggtagcgccagccgtcggcggtttccgcttcgccggtgtgcagctcgtcgggattcatggtgacaattgagtttgcggcggcaatatgctgactgccgcggtagcgaaagcgctccgcgccttgctcaatcacgccgatgccgaaggcttcgtgggtatggggttcaaaggcgtagcgggatatatgggcgtggtaaagctccaccccgggcagctgttcgagatggcgaaagcgcgcgcggtctttttcatcactaaattggagtggtacgccctgcatgcctgcctcccgacggttatcccttcaatatgggagaggaaccgccgggacgcaaccgcaaaagctgagaggggcggttacagaatgccttttacactctcggcaagggaggtggtcgggcggccgatcagcgtactcagggtgcggctgtcgtcaaacagtccgcctttcgacgcgccgacatcggaatccgccagcatatcggcaagcccggccggcaggccgacgcttttcagcgcggcggcgaaatcggcttcgctgaggttctggtagaccacgtttttcccgctttgcttgctcagctcggcagccaggtcgctcagcgtccaggcgttatcacccgccagttcgtaaattttgccttcatgaccctcactggcgataacgcgggcggcagcggcggcataatcggcgcgggtggcggaggcgattttaccctcgccggcggcgccgataaacacgccatgctccagcgccggcggcgcgctggccagatagttttcggtataccagccgttacgcagcagggcgtaagcgataccagagtcggccagcatctgctcggtttcgatatgctctgcggccagacccagcggcgaagtgtcggcatgcagcaggctggtataggcgatgaattttaccccggcggctttggcggcgttaatgacgttgcggtgctgtacagcacgctggccgacttcgctggaggagattaacagcagtttatccacgccctgcagcgcggcggtcagcgccgcttcgtcgctgtagtcggcctggcggacaaccacgccctgctggctgagcgcctgggctttggccgggttgcggacaatcgccacaatctggctggcagggacggtgttaagcaggtcttgcagaacgtagtggccaagctggccggtggcaccggtaagagcgatcatgggtcttctccttcgtatttattggcagttgtggtaagctaccaccttaactaacttttagtaagtacgtacaaaaaggtaagtgtgaaatggccgaaccgacgctgagcgagaaattgcgcaccggcaatttgtttgcggaacagtgcccgtcgcgcgatgtgcttaaacatgtcaccagccgctggggcgtgttgattctggtggcgctgcgcgagggaacccaccgtttcagcgatctgcgccgtaagatgggcggggtcagcgaaaagatgctggcgcagtcgctgcaggcgctggagcaggatggttttatcgaccgcgtctcttatccggtggtgcccccgcacgttgaatatagcctgacgccgctcggcctgcaggtgagcgagaaggtggccgccctggcggactggatcgaggttaatctgccctcggtgctggctaaccacggggagtgaaaatgtatcactccctgtagccccggtaagcgcagcgccgccggggaacaggcattacttgctcaaatccagctgataaatggcgaagccgatatcatcggtggccacctggcgcattggatactgcgctttctctttgataaacgccgcggctttgtcgccaggcgaggtctcaaaacgaatatccaacggcgtgttgctgtggatcggcgccagacgccagttgttatccgccgccggatggatcgcgccttccttcttcgattgcgcgccaatccatgccgccagcaccgaacggttttcatccggtgaggcgaaggcgatatggctctcaccggtgccggcgaatttgccgccgtaagcgcgatagttattggtcgcgaccaggaaagtagcctgcggatcaaccggttttccattgaaggtcaggtgcttaatacgctctgcctgcggatggatcatctgacattcgccgtcgtagcgggccggctgagtgacgtcgatctggtagttcaccccgtcaatgacgtcgaagttgtaggtgcggaagccgtcccagttgatcagcgactgcggcttgctgctggcgggatcgatctggttaaactgtccggcagagcattccagccactccttaacctctttcccgctgaccttcatcaccaccagggtgttggggtagagatagaggtcggcggcattgcggaaggtgagctggcctttctccacttcgacaaagctcgccggatcgtttttacgcccgccgactttaaacggcgcggcggcggagagcaccggcagcttcgccagatccgggtcgccctgaatatagtgttcgacgtaggctttctgcgccatgttgaccacctgcaccgtcgggtcgtcctgcaccagcgccagatagctgtacatgttgtcggcggacttgccgatcggcttgctgacgaattcgcgagtggcgtcatgatcggctttcagcaccgccaccagcttgccatcttcggccgccagtgatttcttcgccaccgcgtcatagattggccgcgcttccgctttactctgagttacctgccatttaccgctgtcgttatttagcaccagatcgaccaccccgagatgatcgccccacattcccggcatcaccgccggtacgccgttcagcgtccctttggcgatatccgcgcctttgatgttggcgaagtctttacccgggaacaccgcgtgggcatggccgaacataatggcgtccacgccgggcacctggcttaagtagtaaaccgaattctcggccatcgcctgatacgggtcggcggagaggccggagtgagcgaccactaccaccacatcagcccctttcgcccgcatctccgggatatatttgcgcgcggtttcggtaatgtcattgaccgtcaccttgccgttaagattggctttatcccaggtcatgatctgcggcggcacaaagccgatatagccgatgcgcagggtgtggatttgaccgtcgctgtccacgacccgggtatcctggatcaggtacggcgtaaacatcggtttgccggttttggcatcgatgatattggcgttcacgtaggtgaacttcgccccggccagcgccttgtgcaggaagtcgagaccgtaattgaactcatggttgcccaggttgccgacggcgtaattcagggtgttcatcgccttatacaccggatgtacatcgccctctttgagcccttttgccgccatatagtcgcctaacgggctcccctggatcacatccccgttatccaccagcacgctgtttttaacttctgcccgcgcctgttcgatcaggctggcggtacgcaccaggccgaatttctccgtggcggcatctttgtaatagtcgaagtccatcatattgctgtgcagatcggtggtttccatgatccgcaggtcgaccgtcgcggcgttgacgctggcggcgatcagcgtggccaggagcgttgcgctaaacttaatcatcagaggcgtccttttttatgagcgatagcacagaagaaaatgtatttatattctgttgcttacagaaatgtgaatcttgccagaaaagcgggcagagaaaccgccatcgttatcacagatagcggaactcgcggtgatgcgatataaataaaacaacgagttaacgccactgtaaccagacgaggtggagaatgttagaacaagtatgtcagcttgcacggaatgcgggcgatgccatcatggaagtctacgatggaaaccagccgatcaacgtcgccagcaagaaagatgattctccggtcacggcggcggatatcgcagcgcataaagtcattgtcagcggcctgcaggcgctggatccggataccccgatcctctccgaggaggacccgccgtcctgggaagtgcgccagcactggcagcgctactggttggtcgacccgctggacggcaccaaagagtttattaagcgtaacggcgaattcaccgtcaatatcgcgctgattgaaaacggcaagccgacgctgggcgttgtctatgcgccggtgatgaaggtgatgtacagcgcgcaaaatggcaaagcctggaaagaagagtgcggcgtacgcaagcagatccaggtccgcgatgcccgtccgccgctggtggtgattagccgctcccatagcaacgatccggagctgcaggagtatcttgagcaacttggcgaacaccagaccacctcaatcggttcgtcgctgaaattctgcctggtggcggaaggtcaggcccagctctatccgcgcttcgggccgaccagcacctgggacaccgccgccggccatgcggtcgcggtggccgccggggcgcatgttcacgactggcaggggaaaaccctcgactacacgccgcgtgaatccttccttaaccccggcttccgggtctctatttattaagcaatttatgcagcaggtcgatcacctgctgcacctcttgttgggtgagggcgccgtctttagcccactgcacacgcccgttcttatccagcaccacgatcgctgagctcttctcgtccagctgccaggccttccgcaccaggccgttgctgtcgacgataaattgcgaccatgggaagagctttttattactttcaatgctgttgcgtacaaacatcccggtgcccgggatggcgtcgtcagtgtttacaatggtggtggtctgatagcgatcgtgcgggaagcccgccgctttaatcgcctcgatcaggttggcattcttctcttttgctgacgagcgtccggcgatgtgctggaccacgcgcacttttcccgccagctgggcgctattccagtttttatagctaaacttatccttatccagaataagctctccccgatccgcgacgccaacgggcgccacgcgctggccgtcgacgaagttatgcgctgtggccagcagcgggagaagcagtaacgaggcggccagtatgctacgtagggtcatgcgcaatccttaatcatttttatgcaggtgatccgaccacttggtctcgtttaatcataagtgcgattgacggtgattacccgcaatgaggatgccagtttgcgtgttgacgcacaaattagtcgtaaaacggcgacttatacttacttcatcgtatgtctgaaacgaaaattctgaattattgtcatcaaagggtaaataaacttatacatactgggtccctctgagattctggactatagttttagggcattaaaatttgcgctcccaagacgtgggctaactgtggcaccacaagagcgtaaccctggcaggagagaagaatgaaaattttccaacgctacaatccgctgcaagtggcgaagtacgtgaagatcctgtttcgtggacggttgtacatcaaggacgttggcgcatttgaatttgataagggcaaaatccttatcccgaaggtcaaggacaagctgcatctgtcagtgatgtccgaagtcaatcgtcaggtgttgcgtctgcaaactgagatggcatagcctggcacgtagcagtacgtagtaggtaaaagacggctcccgatgggagccgttgatgtttttagcccttcatttccgcatagcgtttgcgatattcgcccggtgggatgccgttatgtttacgaaacaagcgggtgaaatagaccggatcgctgtagcccaccgataaagcaattttgttaagtgggagtgtgggataaccatttgggccataaaaaagggcggatggtcatccgcccttaggagagagaaaagattacgctcaggcgttctggctttccgccgtttccgcctgcttcggcaccagcaccgttggcttgttatcgatgcgggtcaccagcagctggtcgatacggtagttatcgatatccacgacctcaaacttatagccggagaacttcaccgcgtcggtgcgtttggggattttacgcagcataaacatcataaagccgccgatggtctcgtaattcccggactgcgggaactcgtcgatatccagcacgcgcatcacgtcatcaatcggcgtaccgccatcgatcagccacgagttttcatcgcgggcgacaatctgctcttccagcccctggccgacgaggtcgcccatcagggtggtcattacgtcgttgagagtgatgatcccgaccaccagcgcgtattcattcatgatcaccgcgaagtcttccccggcggttttgaagctttccagcgcttccgacagggtcagggtgtccggcacgatcaacgtgttgcggatctgtacgccgccggtcagcaccaggctctggttcgccagcacgcggttcagcagatcttttgaatcgacgtaaccgataatgtggtcgatatcttcattacagacgaggaacttcgagtgcggatgttcggccactttattcttcaggctctgctcgtcttcgtgcaaatcaaaccaaatgacgctttcacgcggggtcatggaggaaggaacggtgcgggactccagctcgaacacgttctcaattagctcatgctcctgcttgcgcagcaccccggccagcgcgccggcctcgaccacggcatatatatcatcggaagtgatatcgtctttccgcaccatcggcagtttgaagatgcggaagatcatgttggccatgccgttaaacaaccacaccagcgggcggaagactaacaggcagaagcgcatcgggttgatgatgcgcagggccactgtttcgggcgcaatcataccgatgcgtttcggagtcaggtcagcaaacaggatgaacaagctggtgaccagggtaaaagagatgatgaagctcagctgctcggagagctccggcgacaaatacccgctgagcaggctatgaaacgccggtgagaaagccgcgtcgcccacaataccgccaagaatggcgacggcgttgaggccaatctgcacgacggtaaagaaggtgcccgggttctcctgcatcttcagcacccgctgtgcgttgacgttgccttcatcggccagcagtttcagtttgattttacgtgaggcggccagtgaaatttccgatatcgaaaaaaacgcactgacggctatcagacagagtattactaaaatactgtttaacatatcttttctgaccgttgaggccagatcctcggaagggaagttgataactcaaatgtggaatacataaaaaaccggtccgaaggcgctggaccggctgtcacactggctagtatagcgtaagggaatgtaaagccgccagagcgttcattgaccgcctcgctgttgaggcggaaatcagaattacgcctgaggcggcaggcagacgccaatgccgccgatgccgcaatagccgtgcggatttttatacagatactgctggtgatcgtcctcggcatagtagaacggtttggcggtggcgatctcggtggtgatgtgacgggtatcgtgcgcgtcgttcatcgccgcctggaagcgcgcgaggctggcctttgccgcctccgtctgttccggggtcagcgggtaaatcgccgagcggtactgggtgccgtggtcgttaccctgtcgcataccctgcgccggatcgtggttttcccagaacacctgcaataactgctcatagctaatcacctgcggatcataaactacgcgtaccgcttccgcgtgaccggtctggccgctgcacacttcgcgataggtcggattgggcgtatagccgccagtgtaacctgcggcggtgctgtaaacccccggcaattgccagaacaggcgctcaactccccagaagcagcccatggcgaacagcgccacttccatccccgccgggacgttggtcatcgagtggccgttaactgcgtggagcgtcgccactggcatgggggtattgcgtccaggcagcgcatccgcctgggcgacaagatgcgttttatcaaatagactcacggttggcctctcaatacagaaatcgtcgttaaggttgtaacgaagcgtgtcttttaacacaataaatacgcgtaatacgtctagattaatacataagaattatttgggttattgccactttttcaaccctatgttgttagggttttgttaagccgtggagcggcgccagtgtttcctgtagaggaaacagggatattcaggagaaaatgtgctaaaaatccgccagttatgtgtcaccagccttttgctggtcagcggggtcgccagcgcagcgaatgtgcgtttgcaggttgagggattatccggggagctggagaaaaacgttcgcgcccagctttccaccatccagagcgatgaagtcacgccggatcgtcgctttcgcgcgcgcgtcgatgacgccattcgcgaaggcctgaaagcgctgggttattacgagccgacgattgaatttgatttgcgtccgccgccgaaaaggggacgtcaggtgctgatcgccaaagtgaccccgggagaaccggtgcgcattggcggaaccgaggtgattctgcgcggcggcgcccgcaccgatagcgactacctggcgctgctgaaaacgcgcccggccatcgggacggtgctcaaccacggggattatgacggcttcaagagctcgctgacccgcgtcgccctgcgcaaaggctactttgacagcgagtttcttaagagccagctcggggtctccctcgaccgtcatcaggcgttctgggatatcgattacgacagcggcgaacgctatcgctttggccacgtcactttctctggctcgcaaatccgcgatgaatacctgcaaaacctcgtgccgtttaaagagggcgactactacacctcacaggacctggccgagctaaaccgccgcctggcggcgaccggctggttcagttcggtggtggtggcgcctgattttgctaagtcgcggaaaaccaaggtgctgcctctgcagggcgttgtctcgcctcgcaaagagaacaccgtggaaaccggggtcggctattccacagacgtcggtccgcgggtgaaagccacgtggaaaaaaccatgggtcaactcgtatggccacagcctgacctccagcgtcagcctctccgccccggagcagcagttcgactttacctataaagtcccactgctgaagagccccctcgaacagtattatctgatgcagggcggttttaagcgtaccgacctcaatgatacccaggccgactctaccaccctgggtgtctcgcgtttctgggagatgtcgagcggctggcagcgagcgattaacctgcgctggagcctggatcactttacccaggcgaacgtcaccaacaccaccatgctgatttatcctggggtctcggtgaaccgcactcgctcccgcggcggcctgatgcctacctggggcgattcccagcgctactcggtggactactccaacaccatgtggggctcggacatcaacttcatcgtgatgcaggcccaggacgtctggatccgtaccctctatgaccgccaccgctttgtggtgcgcggcaaccttggctggatcgaagcggacaactttgacaaggtgccgccagatctgcgttttttcgccgggggcgatcgcagtattcgcggctataaatacaaatctatctcgccgaaggacgatgacggcaagctgatcggggcctcgaagctggccaccggctcgctggagtatcagtacaacgtcagtggtaaatggtggggcgccgtgtttgtcgatagcggcgaagcggtcagcgatattcgcgagagcgatttcaaaaccggcgccggggtgggcgtgcgctggcagtcgccggtggggccgatcaagctggatatcgcccggccgatcggcgacaaagaagagcatggtttacagttttacatcggtctggggcctgaattatgagtttatggaagaagataagcctcggcgtcttaatcgtgttggtgctcctgctgggcaccgtcgggttcctggtggggaccaccaccggcttgcatctggtgttcaaagcggcggatcgctgggtaccggggctggaaatcggcaaagtgaccggtggctggcgtgatttaaccctcgataatgttcgctacgaacagcccggcgtggcggtgaccgccggtcagtttcacctcagcgtcaggttgcgctgcctgtgggacagcagcctgtgcgtaaacgacatcgcgctgcgcgatatttacgtcgccgtcgataccaagaagatgccgccctcagcgccggtcgaggaagaggacagcgggccgctgaatctctccactccttatccgatcaccctcagccgcgtcgcgctgcataacgtcaacgtcaaaatcgatgataccgcggtctccgtacgcgacttttccaccggcctgaactggcaggagaaaaatctgaccctgacgccgacctcgctgcaggggctgctgatcgccctgcctaaggtggcgaaagtggcgcaggagcaggtggttgagccgaaaattgacaacccgcagccgcaggaaaaaccgctcggcgagacgatgaccgacctcttctcgcagccggtgctgccggcgatgaccgatgtccatctgccgctgaacctcaatattcaggcgttccgcggcgagcagctgcgcctgaccggcgataccgatatcaccgtgtataacctgctgctgaaagtcagcagtattgacggccagatgaagctcgacgcccttgatatcgactccgatcagggcaaggttagcgcctcgggcagcgcgcagctgcaggataactggccggtggacattaccctcgccggaaccctgaacgtcgacccgatgaaaggggagaaggtgcagctgaaggtgggcggcgaagtgcgtaaaacgctcaaagtcggagtggacttaagcgggccggtcgcggccacgctgcgcgcggatgcgcagctggcggaggtagggctgccgctcaatatggagctgaagagtaagcagctcgcctggccgttcagcggcgagaagcagtttcaggccgacgatgtccagctgaagttcagcggcaaaatgaccgactatgcgctggccttctccaccgcggtgaaaggtcaatcgctgccgccggcgaaaatcgccctcaacgccaaaggcaatgaacggcagatcaatctcgacaagctgacggtcaatgccctggaagggaaaaccgagctgaaggcgctgctagactggcagcaggcgatcagctggcgcggcgagctgaccctcgacggcatcaacaccgccaaagaggtgccggactggccgtcgaagcttaacggccggatcaagacccagggcagcctgtacggcggcagctggcagatgtcggtgccggagctgaaaattaccggcaacgtgaagcagaacaaagtggatgtggcgggctcgctgcagggtaacagctatctgcagtggaaaatcccgggactgcatctggcgttaggcccgaacagcgctgatatcaaaggcgagctgggggtgaaggatcttaatctcgacgccaccatcgatgcgccgcacctggataatgcgctgccggggctcggcgggacggcgaagggcttggtaaaagtgcgcggcacagtcgatgcgccgcagctgctggccgatatcaccgcccgggcgctgcgctggcaggagctgaccatcgcccaggtcaacgtcaaaggggatgtgaaatccaccgatcagattggcggtaacctggacgtgcgggtggatcgcatcagccagccgggggtcaatatcagcctggtgcagctcaatgccaaaggtacagagaaacagcatgagctgcggctgcgcgtgcagggcgagccggtttccggccagctggcgctggcaggcagcttcgatcgtcaggccgaacgctggaaaggctcgctgagcgatacccgcttccagacgccggtggggccggtagcgctgacgcgcagcattgcgctggactatcgcaatctggagcagaaaatcagcatcgggccacactgctggaccaacccgaacgccgagctctgcgtgcctgaaaccattgacgcgggcgccagcggacgggcgcgggtgaatctcaaccgcttcgatctggcgatgctcaagccgtttatgccggaggcgacccaggccagcggcgtgtttactggtaatgccgatgtgagctgggacaccaccaaagagggactgccgcagggcaaagtgaccctcagcgggcgcaacgtcaaggtgacccaggtcgtcaacgacgcgccgttgccggtggcgttcgatacgctgaacctcagcgccgacctgcacaacaatcgcgccgagctgggctggcttatccgcctgaccaacaatggtcaactggatgggcaagtgcaggttaccgacccgcaggggcggcgtaatctcggcggcaacgtcaatatcagcaacttctcgctggcgatgatcaacccgattttcgctcgtggtgaaaaggcagagggaaggctcaacgcccgtctgcgtctgggcggcaatgtgaaaagtccgcagctgttcggccagatgcagctgagcggggtggatatcgacggcaactttatgccgtttgatatgcagccgagccagctggcgatgaacttcaacggcacgcgctcgaccctgcaggggacggtgaacacccgccaggggcaaatcgccctcagcggtaacgccgactggacgcagatcgataactggcgggcgcaaattgcggcgaaaggcagccgggtgcggatcacggtgccgccgatggtgcgtctcgatgtatcgccggatgtggtgtttaccgccacgccaagcctgttcaatctcgacggcaaagtggatgtgccctgggcgcggatcgtggtcaacgaggtgccggagagcgcggtcggtgtctcctctgatgaagtgatgctggataaaaacctcaagccgattaagcagcagagcgccagcatcccgatcaacagcaacctgaccattcacgtcggcaacaacgttcgtctggaagccttcggcctgaaagcgcgtctgaccggtgatttgaaagtggcgcaggacaagcaggggctgggcctcaacgggcagattaatattccggacggccgtttccacgcctatggtcaggacttgattgtccgcaaaggggagctgctgttctccggtccgccggatcagccgttgctgaatatcgaagcgattcgtaacccggatgccaccgaagacgatgtgatcgccggcgttcgcgtcactggctccgccgatcagccgaaagcggagatcttctctgatccggttatgtcccagcaggaagcgctgtcttatctgctgcgcggccagggtttgagtagtggtcagagcgatagcgccgcgatgacctcaatgcttattggtatgggggttgcacaaagtggtcaggttgtgggtaaaatcggcgagacgtttggcgtaagcaacttggcgttggacaccgaaggggtaggcgattcttcccaggtggtggtcagcggctatgtactgccgggtctgcaggtaaaatacggggtcggtatcttcgattccctggcgacgctgactttacgttatcgcctgatgcctaagctatatgtggaagcggtgtctggcatcgaccaggcgctcgatttgctctatcagtttgagttttagcaatgcgaatatttgtttacggcagtttacgacgcaaacaaggcaacagccactggatgaccaacgcccagtggctgggcgctcatagtgtcgacgattatcagctgtacagcctgggccactatccaggcgcggtgcccggcgaaggcacagtacatggtgaagtttatcgtattgatgcatcgacgctggccgaactggatgcgctgcgcaccaaggggggcgagtatgcgcgccacctgattcagacgccttacggcagcgcatggatgtatgtctatcaacgttccgttgagggttgtacgttgatagcgaacggcaactggttggatcgcgaccagtattaaccacgacagcgccaccttcgggtggcgttgttttttattacttcagttcccatggcgtcattctggcgccctgacgtctggcataacgtaatatggcctgatgtaccttcactctaccggccacccgacgtgacaggggatgggcaatcatacggacaaactccatcactattaacagcaggttaatcgggagcagggtgcctgtcagcctggtaagcatttcacgataaaatggccaactgcccagattaagcatggggtcgtgcagtttgatggtgagcgtaaaaaacatcactatgagtacgaggccgtacgcgattttataaattgatgccatctgctgattgccgggatgaaaggggctattttttaaataaacactgccatcactgacattgtataacgcctgaagatcatcgtatccatgccggcgtgcggcgataacccagtccccatcggcaagaaatggcgggcgacaacgattattcagggcatcgctcagccaggtcaagcgcgctgaaaaaaacgagtgacgagtcgccagctgaaaacaggcgccttctttgataaaataaggccttaccctcgtagcgaaccatatttgataataactattcagaatcacgccttcttcaagcgcaaattcttttggcagcgctatctcgttgttggccgatggtggatgcctttcagaagtagcgggtagaatttccagacgctgacagaatgaaatatcgccttgcttcgttcgctgcattttcgcattgagaacacgtaacctgagtgagaaattgcaagagcaaaaagagaagatgccgaagggattcaccaacattgtgataaaacataataataaaaaaatatccaaccatggagcacaagcgagaatgatcaagcaaacaaaaaagaccaagccgacaggtcgaagaagctttttaatactcagcggctgccgggaaggttcgagcaaaatgtggccatcgcttaaccagtggatccagtaactgccatcctttaggcggcaagtgccgatatgtagcggctggccgagcctcagacggtcaaaaagcgaggggtctttaaaatggcgtttatcggtataaaaggcatgctcgcctgcaatgaggcgtaaatagctttgctcttccgaggcggcagtggtgaagccggtaaaattcacggtgaaataatgggtctgtttcacaaggttccttccttgatgaaatgatggtgttttacgtatcacgcgttgccgacccactccttaccagagcgggagatgatccttcgccagccacatcgcggaagccaacgtcgtcagcgcgaggaataataatcgtcgtgttggggtgctgaacattacatgatctcctcgagcgcggtatggcgggccgctccctgcaggtagtgccgcatcgccgagcgcatcttcatccagtcagccacccggtgtgacaataaccaggccgtcgggccaatcaactccagtaccgccaggatcccgccgaaactgagtaataatagggacagcatgtccagtgaatcctgaattaaccacccaaatcccctggctggtttgtatgggttatttagcgacatgccgagtatgaggaggtaaatcaccagcaccatgccataaaacaggttatagactagcgacatttgccgatcaccgggataacagggatgatttttcagaaaagcgcccccgtcgctgacgttgtataacgcctggacgtcgttatctttccgttggtagacgacgactatccgatcgccgatagcgagaaagggcggttgacggcggtaaaaaaagggatgtaggccgaagttggcgaagccgttctgccagaagaaggccagcggcgccgtgtcgcattgtatcccaacgccatggtattcccgcgttgggttccccgcgaaccatttcttaaaaatgatattgctaatttttcccgtccggacggcatagcgttccggcagggcttgcgtaaaaggcttcgccgactggcggagggtttgcgccgtagtcggtagcggctggcaaaaggaaaagtcgcggcggcgggcctgcgccatcttcgccaacagatcgcgcatggcggggtgcatttttagcgcccggtggaacagtagctcgcagaggccggttaacaacgcgatgaaggccagtatcgcgataatgccgaagccgaaccttccccattctgaggtgctcatcacgagcgggataagagcgacgatgagcgtcagcaggctgataatcagcagcggccgggcccagcgctttacccgttgactgggctcaaggagcgtttcgccatcgctgagccagtggatccagtaactgccgttgtccaggcggcggacgccaaggtgcagaggctgattgatcgtcaggcggtcaaaaagcgaggggtcgttaaaatagcgtttatcggtataaaagacatggtcgccggcgataagacgcagatacccctgtttttcacaggcggcggtcgtgaagccagaaaagttaagggtgaaatagcgaacgcttttcacgggacaccctccatggtgttatcgcggctatccgtgccgcaatcaggcaggggatgaccctgcctgagacagaattacttctgcttagcgcgctcgaaagaggcaacgatttcggctttcgccgcttccgcgttatcccaaccgtcgactttaacccacttgcctttttccagatctttgtagtgctcaaagaaatgagtgatctgggctttcagcagttccggcaggtcgttcacatcgttgatgtgatcgtattctttgctcagcttggtgtgcggtacggcaaccagtttcgcatcttcaccagattcgtcggtcatcttcagaacgccaaccggacggcagcggatcacggagcccggctgcagcgggtacggagtcgggaccagcacgtcaaccgggtcgccgtccagggacagggtgtggttgatgtagccgtagttgcacggatagaacattgccgtggacatgaaacggtcaacgaacagtgcaccgctctctttgtcgacttcgtatttgataggatctgcgttcgccgggatttcgatcacgacgtagatgtcttccggcagatctttgcccgcaggtacgttgagtaagctcatgtctgtttcctttaaaatgtatggcaaacaagtgctcggtattatagccaactcacatcgaaagtcttcgcttctttttcccgatatcgccgcagagtgctccgaatttttcgcgtaataatgacatgaaaatccataaacatagccacatcatgaataaatttatgtaaccgttttcattgcatgtgattgatttatcatactgcttaaaaaaacgtcataaaccgcaacagccgcgctccctgcgaagccttatcggctctccgctgggaagtagggccggcattaacatctcatttacttttttgaagtgtgatgtaacgcattcagttacatcaccgattgtctatagtttgtccgcaggtgagactttaaccaacaataaccctacgaggatacccttatgtggaagcgcttacttcttgtcacagcagtttccgcagctatgtcgtctatggcgatagctgccccgctaaccgtaggtttttcgcaggtcggttctgaatccggctggcgtgcggcggaaaccagcgtcgcgaaagaggaggccgccaagcgcggtatcaccctgaagatcgctgatggtcagcaaaaacaggaaaaccagatcaaagcagtgcgttcctttattgctcaaggggtcgacgcgatcttcattgcgccggtggtggccaccggctgggaaccggtgctgaaagaggcgaaagaggccaagatcccggttttcctcctcgaccgttccattgatgttaaagataaagatctctacatgaccaccgtgaccgccaacaacgtgctggaaggccagctgattggcgactggctggtgaaaaccgtcgacggtaagccgtgtaacgtcgttgaactgcagggcaccgttggggctagcgtggccatcgatcgtaagaaaggcttcgccgacgcgattgccaaagcgtcgaatatcaaaattatccgctcccagtccggcgacttcacccgcagtaaagggaaagaggtcatggagagctttatcaaagctgagaataacggcaaaaacatctgcatggtgttcgctcataacgacgatatggccatcggcgccatccaggccattaaagaagctggtctgaagccgggcaaagatattctgaccggctccatcgacggcgtgccggatatctataaagcgatgatcgccggagaagccaacgccagcgtcgaactgacgccaaatatggccggcccggcgtttgatgcgctggagaaatacaaaaaagacggcaccctgccggagaagctgaccattaccaaatcgacgctgtacctgccggatacggcgaaagaagagttagagaagaagaaaaatatgggctactgagtggggagcccctcattccatccctccccccggtgggagagggtaaaaagcagcgttccagaaaccccgggaagccaagcgcgacccggggtaacctgacatcatttgaaggtgacatcgattatgagcgccgaggcacaccaggagatccttcgcaccgaaggacttagtaaattcttccccggcgttaaggcgctggataacgtcaactttagcctgcggcgcggcgaaatcatggccctgttgggcgaaaacggcgccggaaaatcgacgctgatcaaagcgctgaccggcgtttaccatgccgatcgcggcactatctggctggaaggccaggctatttcgcccaaaaataccgcccatgcccagcagctggggatcggcaccgtctaccaggaagtgaacctgctgcccaatatgtcggtggcggataacctgttcatcggccgtgagccgcggcggtttggtctgctgcgacgtaaagagatggaggccagggcgacggcgctgatggcctcctacggcttttccctcgacgtgcgcgagccgctgaaccgcttttcggtggcgatgcagcagatcgtcgctatctgtcgggccatcgacctgtcggccaaagtgctgatcctcgacgagcccaccgccagcctcgatacccaggaggtggagatgctgttcaccctgatgcgccagctcagggataacggcgtcagcctgatcttcgtcacccattttctcgaccaggtctatgcggtcagcgaccgcatcaccgtgctgcgtaacggcagcttcgtcggctgccgcgagacccgcgagctgccgcagattgagctggtgaaaatgatgctgggtcgcgaactggaccacaatgccctgcagcgggcgggccgtaccctgctgagcgataaaccggtagcggcgtttgaaggctacggtaaaaaaggaaccatcgccccgtttgacctgcaggtccgcccgggcgaaattgtaggcctcgccggcctgctgggttccggacgcacggaaaccgccgaggtgatcttcggcattaaaacggcggacagcgggaaggcgtggatcaaaggcaaacctcagaccctgcgctccccgcatcaggcttcctgcctcgggatcggcttctgtcctgaagatcgcaaaaccgacggcattatcgccgctgcctcggtgcgggaaaatatcgttctcgccctgcaggcgcagcgcggctggctgcggccgatcccccgccgggagcagaatgagatcgccgagcgctttattcgccagctggggatccgtaccccgagcgccgagcagccgatcgagtttctctccggcggcaaccagcagaaggtgctgctctcccgctggctgctgaccaaaccgcagttcctgatcctcgatgagccgacccgcggcatcgacgtcggcgcccatgcggaaattattcgcctgattgaaaccctctgcgccgatggcctggcgctgctggttatctcttctgaactggaggagctggtgggttacgccgatcgggtcattatcctgcgcgatcgccgacaagtggcggagatcccgctcgccgagctctctgttccggcgatcatgaacgctattgcggcataaggagtaacccatgatgcctcgatctctttcgcaaaccggcccggagaagcgacgcttcacctggccgaagggcaccccgcagattattgccctgctgctggttctgctggtagacagcctggtggcgccccatttttatcaggtggtgctccaggatggccgcctgtttggcagcccgatcgatattctcaaccgcgccgcgccggtggcgctgctggcgattggcatgacgctggtgatcgccaccggcggcatcgacctgtcggtaggggcggtgatggcgattgccggcgcgacggccgcctcgatgaccgtcgccgggcacagcctgccggtggtgctgttggccgcgctggccgcgggcgcgctggccggattgtggaacggcatcctcgtggcggtccttaagatccagccctttgtggcgacgctgatcctgatggtggccgggcgcggggtggcgcagttgatcaccgccgggcagatcgtcacctttgattccccggccctggcgtggctcggcagcggatcgtttctgctgtttccgacgccggtgatcgtcgccgccgctacgctgctgctgttctggctgtttacccgtaaaacggcgctgggcatgtttattgaggcggtagggatcaacatccgcgcggcgaaaaacgccggcgtcaatacccgcatcgtggtgatgctggcctatgtcctgagcggcgtctgcgcggcgatcgccgggatcatcgtggcggcggacatccgcggcgcggatgccaataacgccgggctatggcttgagctggacgccattctggcggtggtcatcggcggcgcctcgctgatgggcgggcgctttaacctgctgctctcggtggtgggggcgctgattatccagggaatgaacaccgggattttgctctccggcttcccgccggagctcaaccaggtggtgaaagcggtggtggtgctgtgcgtactgattgtccagtcgccgcgctttatcggtttactgaaaggggtacgcggccatgataaaacgtaatttaccattgatgatcacccttgcggtgtttgtgctgggctacctctactgcctgacccagttccccggttttgcctcaacgcgggtgatctgcaatatcctgacggataatgccttcctcgggatcatcgccgtgggcatgaccttcgtgatcctctccggcgggatcgatctgtcggtggggtcggtgatcgcctttaccggcgtcttcctcgccaaagcgattggcttttggggaatctcgccgctggtggcctttccgctggtgctggtgatgggctgcgccttcggcgcgtttatggggctgctgattgacgccctgaagatcccggcctttatcattaccctcgccggcatgttcttcctgcgcggcgtgagctatctggtgtcagaggagtcgattccgattaaccacccagtgtacgacaccctgtccgggctggcatggaccattcccggcggcggtcgtctcagcgccatgggactgctgatgctgctggtggtggtggccggtatttttgtcgcccatcgcacccgctttggcaaccaggtgtatgccatcggcggcaacgccacgtcggcgaatctgatggggatttcgactcgcagcgccacgatccgtatctatatgctctccaccggactggcgacgctggccgggatcgtcttttccatttatacccaggcgggctatgcgctggcgggcgtcggcgtcgagctggatgcgattgcctcggtggtgatcggcggtacgctgctcagcggtggcgtcggtaccgtgctgggaacgctgttcggggtggcgatccagggactgattcagacctacatcaacttcgacggcaccctcagctcatggtggacgaaaatcgccatcggcattttgctgtttatctttatcgcgctgcagcgtgggctgaccgtgctgtgggaaaatcggcagaatgcggcggtgacgcgggtgagcggggcggggagtcgctaagaaatgctcctcccgcaggcgcgggaggagcgggcagggcgcttaggcgtccgggaacgctttaataaagttctcgacgtcttctaccatgtggttgttgccgacgaagaaggagcgacgctgatgcaggctttccgggataatatccagaatacgctctttaccgtcgctggccttaccgcccgcctgttcggcgaggaaggccatcgggttgcattcatacagcaggcgcagcttgccttccgggtggctggcggtgctcggatagagatagatgccgcctttcagcaggttgcggtggaagtccgccaccagcgagccgatatagcgtgaggtataaggacgctgagtcgctttgtcctcttcctgacagtacttaatgtacttcttcacgccctgcgggaatttgatgtagttgccttcgttgatggagtaggtattgcccttctccgggaagcgcatgcgctcctggcatagacagaagacgccaagggacgggtcgtaggtgaaggcgtgaacgccgcagccggtggtatacaccagcatcgtcgacgatccgtagaccacatagcccgcggccacctgcttgttgcccggctgcaggaagtcttcttctgtcaccggcgtgccgacaggcgtcacgcggcggtagatagagaagatcgtaccgacagagacgttaacgtcgatgttagaggagccatccagaggatccatcagcaccacgtatttggcgtgttcacacccttcgaagacgacaatctcatcttcttcttcagaggcaatcccggcaacaatatcgcgtgctcgcagtgcggcttttaatttttcattagcgaacagatcgagtttttgctgaacctcgccctgaacgttttcagcaccgctggcacccaggatatcgaccagaccggccttgttgatatcgcggtggatgatcttggcgcccaactttattgctgacaacaaagcagtcagctcaccggtggcgtgggagaactcgtgctgcttttcaacaataaactcacctaacgttttcataactcgttccctgcatttttatgttgagtaaaacgaacgcaacaatcttaacaaagaatcaaaaaagtgcgcacaggtgaatcgcgccagcaaaatacagattcgcctgaaatgcatttcgccagggcccgggatatgggtaaaatgtgccccggataagaaaaggaaatgacgaatgcgcattcatattttaggaatctgtggcacgtttatgggggggctggccatgctggcgcgctccctcggtcatgaggtaacggggtcggatgctaacgtctatccgccgatgagcaccctgctggaaaaccaggggattgatttaattcagggctatgaccccagccagctggagccccggccggacctggtgattatcggtaacgccatgactcgcggcaacccgtgcgttgaagcggtgctggaaaataatattccctatatgtccggcccgcagtggctgcacgacttcgtgctgcgcgatcgctgggtgctggccgtcgccgggacccacggcaaaaccaccactgccggcatggcgacctggatccttgaagcctgcggctataaaccggggttcgtgattggcggcgttccgggcaatttcgacgtctccgcgcgcctgggcgacagcccgttcttcgtcattgaagccgacgaatatgactgcgccttcttcgacaagcgctccaagtttgttcactactgcccgcggacgctgatcctcaacaaccttgagttcgaccacgcggacatctttgatgacctgaaggcgattcagaaacagttccaccatctggtgcgcatcgtgccgggcaaaggcaaaattatcctgccggagaacgacatcaacctgaagcaggtgatggcgatgggctgctggagcgagcaggagctggtgggcgagcagggccactggcaggcgaaaaaactgaacgccgacgcctcgcagtgggaagtcttactcgacggcgaaaaggtcggcgaagtgaagtgggcgctggtcggcgagcataatatgcataacggcctgatggcgattgccgcggcgcgtcacgtcggcgtgctgccggcggatgccgcgaacgcgctgggcagctttatcaacgcccgccgtcgcctggagctgcggggcgaagccaacggcgtcaccgtgtatgacgatttcgcccatcatccgacggcaatcctcgccacgctgcaggcgctgcgcggtaaagtaggcggtaccgcgcgcattctcgccgtgctggagccgcgctctaacaccatgaaaatgggcgtctgcaaggacgatctggcgccgtcactcggccgcgccgatgaagtgttcctcctgcagccgcagcatattccgtggcaggtggcggaagtggcggaagcctgcgtccagccggcccactggagcgccgacgtcgataccctggcggagatggtggtcaaaaccgcccacccgggcgaccatatcctggtgatgagcaacggcggcttcggcggtattcatcagaagctgctggataagctggcgcaaaaagcggccgcggctgaataagcgcgtacgcctccggtaactgccctccgcgtgagggcagttttattttagctaccaggaattgtgtgatgctgacctgcgaaagcgtacgttctaccgactcgccccatttcgccatgctggacgcgctttacgcgcgcgcctttccgtggcacgagcagcgcgaaagcgaggccaaacgtcaggcgctgagccacccgcgctacgcgctggaagcatggttcgatgaaggcgtctttgtcggcctcagcggctgctggcagtttgccggctacggttatatcgaacatctggcgatcgacgacacgctgcgctcccgcggctatggtaaacagctgctggcgcagatcctgacgcgcgccccgctgaccattctggaaatcgatccgctaaccacggccatcgcccataaacggctgcgcttttatcagtcgatggggttccatgctaatccctgggcgcatcatcacccgagctatcatcagggcattgcggatcatgagctgctggtgctgagctacccgcagccgatcgatgagcggcagtatcagcagtttgcccgggatctcgggcacgaggtgatggggcgggagtagcccggctcggcgtaccgctccgggcattcgactggcggcgctgttactctttggcgatcggcgtctcgttctccgcgactttgttatcgccctgaatcttagcgattttctgctcaacggcggctacctgggcgctgtcgtgcagcagggtgtaggttagatcaaactgcgcgctggcgcccggctgcagctgtttcacgcgtttttgtttgcgttcaatggtgaccggataggcgtagctggtccccggttcgataccggtgacgtagccctgcttgacggtatcggtgtttttccacagcgtcaggaccggcagctgacgggtatcaaactgaatagaggcccctttatcgcccgctttgttgaccacggcggccagggtctggtgattttcatcggccaggggctgaatattaaataccatctcgtcaaaatctttggtcggtccctgataggtttgccaggtttttaacccactcttagcgtaatcattgaacgggctgatgctggacatcggggcgaggaaacgcgcgccttcttcgaggatcggggtgccgaagttgctgtggtagatgatctgataatcatgcggatagtcggcatggttggttaagacgtcatgtaagctgaagctgttgctgcccggcacgtagcgcagttcggtcagggtctgcagatcggcttttttaaaggtgctctctttcaccagcccgcggatgcggatttcatacggcgcgctgtcggccacctccacctccaccagagaggccggcgtgttgcccgccttgccgtgtagggtataaatttgcccgtccgcggtcaccggatggccggtccattcatagccgcagcggaccatcatctcgttgaatccttccagccagccgaggccattgcggctttccaggttgataaacgccgggttgacgacctctttaaccggcgaatcccagcccatccggctgccgaaaccctcaatacgcagcaagttcatgccgcgtgtcgggctcagggtgatggtcaggccgtctttactatgaatggtgaggattttgctgccttcctgcttaccgccgtgcaggactttctgctcaatgctgaacgcatgatctttcaccttcagctgatcgctgttgatctgccagtttcctttatccatcccctcttcagcgttcgtcagcacccatgtttttgccgcggccgagccggaaaccagcagggcgatcgtcgtcagaaccaatgtctttttcatttttattccctttttgctgaatcgattgtgtcattgacgtgtgaaatctaccggcatgggggtgattaaaatgtgaagcgcctcacctggtgagaaaacggccgatttgctgaggataaatgggatggaagtcgtattatcttgctatgtaatacgtatttatcaccagaatatgtgatctatattgtttttagctttaacgattcagcttgataagtcaggctataaacaaacgtatcgtcgtgtggatgaggggattcaggcgatgcgacgggaatccccctgctggcgcaagccttagaggtggggtgaaggtaggccggataaggcgtagccgccatccggcataacgacgggaacggagtctggtacagcttgcccggcggcgctgcgcttgcgcgggcctacggtgttgcgtaaccgtttgatatacagggctccgtaggccggataaggcgttagccgccatccggcacaatgacgggaacggagtctggtacagcttgcccggcggcgctgcgcttgcgcgggcctacggtgttgagtaaccgtttgatatatagggaaccgtagcccggataaggcgttagccgccatccggcacaacgacgggaacggggtctggtacagcttgcccggcggcgctgcgcttgcgcgggcctacggtgttgagtaaccgtttgatatacagggctccgtaggccggataaggcgttagccgccatccggcacaatgacaggaacggagtctggtacagcttgcccggcggcgctgcgcttgcgcgggcctacggtgttggataaccgtttgatataccgggctccgtaggccggataaggcgtagccgccatccggcataacgacgggaacggagtctggtacagcttgcccggcggcgctgcgcttgcgcgggcctacggtgttgagtaaccgtttgatatagggaaccgtagcccggataaggcgcagcgcgccgccatccgggagactattgcgggcaaaaacagcgggacttagccttcgttttccgccagttcacgcagatactggaagatcaggcgcgccgatttcggcggcttgttgccttctttctctttcttcgcattgcgaatcagcgaacgcagctgctgacggtcagcatctggccacaggttcagcacttcagcgatggcgtcatccccgtcgtcaatcagtcgatcgcggatctgctccagcttgtggaacagcgcaacctgctggttgtgacggtttttcagcttgtccagcgcctgacgaatcggatcgacatcgcggttgcgcagcatcttgccgataagctgtagctggcggcggcgaccctcttttttgattcgctgggcgagttcgatggcgtcgcgcaggtcggtatccagcggaattttatccagcgcgtttttccccaggtcaacgagttccgcgccaagacgcttcagttcttccgcgtcgcgcttaatttcactcttactgacccagatgatttcatcatcttcatcttcaacgtcatcaccgggcacgtcgtcgagccagtcttcgggctgctttgtcatctcaggctccttaaaaaaagaggctaatgttaccagttaaggcgcgcactgaaaaacggttctctgttagacttcagttaactccttcttacattatggcattagcaatgaaagtcatctctcaagttgcacagcagcgtaagacgctggaagaagccgttaccacggcactggaactggcggcaggtaaatctgatggtgcggaagtttccgtcagcaaaaccacgggcatcggcgtcagcacccgctatggcgaagtggagaatgtagaattcaacagcgatggggcattaggcatcacggtttaccatcagaaccgcaagggcagcgcctcctccaccgatcttagcccggacgctatcgcccgcaccgtgcaggcggcgctggatatcgcccgctatacctccccggacccgtttgccggcgtagccgataaagatctgctggcctttgacgccccggatctggacctgttccacccggcggaggtctccccggacgacgccatcgaactggccgcccgcgcggagcaagcggccctgaaggccgataaacgcatcaccaacaccgaaggcggcagctttaacagccactacggcattaaagtgttcggtaacagtcacggcatgctgcaaagttactgctcgactcgccactccctctccagctgcgtcattgcggaagatgacggcgatatggagcgcgactacgcctacaccattggccgggcgatcgaggatctgcagtccccggaatgggtcggggaagagtgcgcccgccgcaccctgtcacgcctggcgccgcgtaagctgtcgaccatgaaggcgccggttattttcgccaacgaagtggcgaccgggttgtttggccacctggtcggagcgattgccggcggcgcggtctaccgtaaatcgaccttcctgctcgattcgctgggcaaacaaattttgccggagtggctgaccattgaagagcatccgcacctgctgaaagggctggcctccacgccgttcgacagcgaaggcgtgcgcaccgaacgtcgcgatatcgtcaaagacggcgtgctgacccagtggctgctgaccaattactcagcgcgcaagctggggatgaaaagcaccggccacgccgggggcatccacaactggcgcattaacggccgcggcctgagttttgcaaagatgcttaaagagatgggcaccggtcttgtggttaccgaactgatggggcagggtgtcagtggcgtcaccggcgactactcacgcggcgcatccggcttctgggtagaaaacggcgaaattcaatatcctgtcagtgagatcaccattgcaggtaatctgaaagaaatgtggcgtaatatcgtgaccattggcgatgatattgaaacgcgcagcaacattcagtgtggttctgtgctgctgccggagatgaaaatcgccgggcaataacacctgtttgcttaaataataaaaaggaagtgagcaatgcgtaaaaaactgttagcgatgctggctgtctctgcttttgcgctcggttcagcgtcggccttcgccgacctgggcgaagacatggacactctggcagaaaacctgcaagtggtacagaagacctccgacgccggcgagctgaaagcggcgctgaataagatgcgtaccgccgcggtcgatgctcagaaagagaccccgccgaagctggaaggcaaagcggccgacagcgctgagatgaaagattaccgtcacggtctggatattctgatcggccagatcgacggtgcgctgaagctggcgaacgaaggcaaggtgaaagaggcgcaggccgccgcggaggagtttaaaaccacccgcaacacctatcataagaagtaccgctaaccgttcttttcgggaggcatcagccgatgcctcccacctgaaagcctaccgatatcacatttttccactctcttttttcggcctttccgctgccgcgggcgccttgtccacgctcattgttgtgatacatctcacgccatagccgtcgtttttaccttttccctgtgaatatgtggggtcgatcacccctgccgcctccctttccacttcgaagtggaaaacaactcgctacaaactcctgacccccggcgctaccttgatttccagagacatcagcggggtaacacaagtgaataacggagcggtaataaacgacgtaggggagcaggcggcgcagaccgaacgcctggctgacaagatgttacagcaggtattcgccctgttaagccgtcacgacatcgtccctaacgacgttcaggagcaaatgctgacttcccacgtgcgggccatggcccaccggtcaatcagcggcgaaccgctaccggaagtggatgccagtctgttcgaagaaatttctgaagattcaatgatgctggcccgcgaagtggtcgcacagttcggcaacctgcctgatgaagaggcctggctgctctccgtccacttcgaagtcgcgaaagataacctgtaaggagcaaaacatggaacaaatcaccgtagtcattggcgaccgtctgggtaaaggccaaaaagtcgccgcaggcgctgaaaaagcgggcgcacgtgctgtggtcgtccctggcgttgcggccgacatgaagcttggcgacataatgaaagcggaaaatgccaccttcggcatctccttctgcggcagcggcggcgccggcgccatcaccgcccagaccaaatacggctacaaagcaaaatacggtatgcgctctattgatgagggcgtcaccgctatcaacgaaggctgcaacgtgctgggcttcggctttatggataaagaagagctgggcgagcggctggtagaagcctggaaaaagaaatacggcgcataagtatgaaagagcaattcaccaccacggtgagggttgccggcaaaggcgaaagcaaatcacgggccttcgccgatgccctgaaccatgtgcaggctgcggtgatgaaatcatcctcgcgcatcctactgcgtattgagccacaggacgtgacggttgttcatgcgcgcgaagcggtacgaaaagaggcgtttctgttcttctttttgcgccgtgaacgacggacctacagcgtggagctggacgtcaccgtcaacgtgaccgccatcgatctcgataaagtggatttcgtcacgcaaacctgattgttagcataaggtctgactatgttcctgataattttaataaaatcgcttatcatcggcggcctggtcggcgtcggcgtgggcgccggagcggcacgcatgtttcatgcccccaccacgcaggggatgggggcgtttcgaaccctgggcgagctgaattcctgtgagggcgatccggcctcccacttctcctttggccttggcttcttctttaacgcctgggcctcttccgttgcagcaggctccttcacccaggatgttgaccaccgcattatacccaactggggcgcggcggcgctgatgctgaaaaatcgtaacgtcggcgaaacgctgcacgatccgaaaaaaatggccatctcctgcggcatcatcggcatgattgtcgtcgccttcctcaacctgaccgcctcgtccgtaccggaagcgctgcaggtgaccgccgttaaggtactggtgccggcggcaaacctgctggtaaacaccgtgatgccggtgatcttctggctggcggcgatcgatgccggtaaaaaatcaggcttctgggcgacgattttcggcggcgccgcgcagctgattatgggtaacgccgtaccgggtctggtgctggggatcctgatcggtaaaggcgtcgaagagagcggctggaaccgggtgactaaagtgatgatggtggccatcgtcgcgctgtttgtcctcagcggcttcttccgtggcttcgacatgaagatgatcgaatccttccatctgaccgtgccgaactggctggacatgatccacaactcactcagcggcaagtaacgggagccggataatggaacagaataaaggtttttggtatgccgactggtcgttcccgatctttgttggcctgctctcctccggcgtcttcgccgggacccacatgtactacctgtacggcatcggcgcctttaacgaagtagccttcgtggcgatgctgaagtcggggattgataccggcgtttacggcgcggtggcggcgtttggcgctagcttcctgttcgcccgcatcatcgaagggtcgctggtagggatcctcgatatcggcggcgcgatacagaccggtatcggtcttggcgtgccggcgctgctgctcggcgcgggctttgtcttcccggtggcgaacttcgccgcgtcgctggtcaccggcctggtcctcggcctggcggtgggctacatcatcattctggcgcgtaagttcaccatcaaccagagcgattccacctacggcgccgacgtgatgatgggggccggtaacgcctccggccgcttcctcggtcccttgatcatcctcagcgcaatgaccgcctcgattcctatcgggattggctcgctggttggcgcactgctgttctacatctggcagaaaccgatcaccggcggcgccatcctcggggcgatgatcctcggttccatcttcccggtggcgattagctaagcgcccgatggcgctgcgcttatcgggcctacaagccagcgcggtttgtaggccggataaggcggtacgccgccatccgtacactcttttcatcaggagatagctatgtttgatttactcctgcgccgcgcgcgcctcgtcgacgataccctgactgatatcgccattcaggacgggaaaatcgcggcgctgggcgagattagcgcgccctcccgtaaaaccattgagctgaacggcaaggtttacgtcagcgctggctggattgactctcacgttcactgctacccgaactcaccgatttatcacgatgagccggatagcgtcggcatcgccaccggcgtcaccaccgtgatcgatgccggcagcaccggcgccgacgacgtcgatgacttctatcaactgacccgtaaagcggcgacggaagtttatgcgctgctcaacatctcccgcgtcgggctgattgcgcagaatgagctggccaatatggccaatatcgacgccgccgcggtgaagcaggcggtgcagcgtcatcccgactttatcgtcggcctgaaggcgcggatgagcagcagcgtggtgggcgaaaacggcattacgccgctggcgcgcgccaaggccattcagcaggaaaacgacgatctgccgctgatggtgcacatcggcaataacccgccgaacctcgatgaaatcgccgatctgctgagcagcggcgacatcattacccactgctataacggcaagccgaaccgcattctgaatcctgccggcgagctgcgcagctctattactcgcgctctgcagcgcggcgtgcgtctcgatgtcggccatggcaccgccagcttcagctttgaggtggcgcggcgggcgattgcgctgggcattctgccgcacaccattagctccgatatttactgccgcaaccggatcgacggcccggtgcgctcgctggcgctggtgatgtcgaaattcctcgccatcggcatgacgctgccgcaggtgattgactgcgtgaccgtcagcgccgcagaagggctgcgcctgtcgcgtaaagggcggctggaagtgggcttcgacgccgatttaacgctatttcgcctggagcaccggcccacgctgctggtggatgctgaaaaagagagcctgcaggctgacaacattctggtgccgctggccgcgatccgcgcgggcaaaggctatctgaccgaacaagggagcgcggaacatgccttcgatttttgagaaataccatttaaaacaggtgattaatacttctggccgcatgacggcgctgggcgtttccacgccgcgcccggaagtggtggaagccgcgatggcaggtatgaaccagtactttgaaatgaaagacctggtgaataaaaccggcgagtacatcgccaaactgttggatgtggaaggggcgaccgttgtctcctgcgcgtcggcggggattgcccagtcggtagcggcggtgctggtgaaagacagcgactggctgctggagaacctgcacgttacgccgattgagaataacgaaatcgtgttgccgaagggccacaacgtcaacttcggcgcgccggttggcaccatggtggcgttgggcggcggtaagctggtggaagcgggctacgccaacgaatgttctgctcaacagctggcggcggcgatcactccgcgcaccgcggcaattctgtatatcaaatcccaccactgcgtgcagaaaagcatactcaacgtggcgcaggccgcggaagtggcgcgccagcataacttgccgctgatcgtcgatgcggcggcggaagaagatctgcagtgctactaccgcatgggcgccgacctggttatctacagcggcgcgaaagcgattgaagggccgaccagcgggctggtgatcggcaaaacgcagtacgtcgagcgggttaagcgccagtcgatggggattggccgggcgatgaaagtgggtaaagagggcattctcggcctgacctgcgccattgaacactacctgacggcgagcaaagagagcggtcagcagatggtggacaagatgacgccgtttatcgaacagctcaatactctcaacggcgtgaccgcgcgggtggtgtgggacagcgcgggccgcgatatcgcccgcgccgaaattaaatttgatgaagtcacgaccggcgtgaagaccggcgatctggttaacgcgctgaagcagggtgaatacgccatctacttccgcggctataaagcgaatgaaggcattatcgaagccgatgtccgcagcgtaaacgcggagcagctggcggtggtcgctcgccgcatcgcagaagttctgaataaggagaaacaagcatgaaactgaccccaaacttttaccgtgaccgcgtgtgcctgaacgtcctggcgggcagcaaagacaacgcccgtgaaatttacgacgcggcggaaggtcacgtcctggtcggcgtgctctccaaaaactatccggacgtcgccagcgcggtggccgatatgcgcgactacgcgaagctgattgataacgcgctctccgtcgggctggggcaggcgatccaaaccagtcggcgatggtgagcgagatttctcgccaggtgcagccgcagcacgtcaaccaggtcttcaccggcgtggctaccagccgcgcgctgctcgggcagaacgagacggtggtcaacggcctggtctctcccaccggtacgccgggaatggttaagatctccaccggcccgctgagcagcggcgcggcggatggcattgtgccgctggaaaccgccatcgcgctgctgaaagacatgggcggcagctccatcaaatacttcccgatgggcggcctgaagcaccgcgccgagtttgaagccgtcgccaaagcctgcgccgcgcacgatttctggctcgagccgaccggcggtatcgatctggaaaactacagcgagatcctgaaaatcgccctcgatgccggggtaagcaaaatcatcccgcatatttacagctcgattatcgataaagccagcggcaacacccgcccggccgatgttcgccagctgctggagatgaccaaacagttagttaagtagtgcccttgtccctcaccctcaaagggtgaggagcagcttatccactgaaccatcaaggagttgctatgcctgtcgctcgtcatctgcttgtcgcttcactgtccctgtttgccgccgccgcgggcgccgcgcaaacccactatgcctgggtaggcacctataaccccaatggcgaaggtctgtatcgctttaccgtcgatgccaaaaccggcgccctgcgcgataagacgctggtgagctcgttgccgaacgtcgcgcaattaaccgtgtcgcgcgatggcaaaacgctgtatgccgccagtgaggtcgaaaaaggcgtggtgcaggcgtggcgcattgaaaagaacggcgagctgaccgcgctcagccaggtcgcctccggcggcgccgggccggtgtatctctccctgacgccggacggtaagcatctgctggtggctaactatgtcagcggcagtatcgccgtgctaccggtgcaagaagatggtagcctggctgaggcggtggacaggcatcaggatgaaggcccggcaggcgccgaacgcccggcggcggccgtcgagggcagcttcgccatcagcgatcacaacggcccgcatgcccatatgatcgccgccgatcccagcgggaaatacgtttactctaccgatctggggctggatcggatctatcagtatcggctggatagcgccagcggcaagctaacgccgaacgatccgccgtttatcgccgcctcgtcgccgggagccggcccgcgccacttcgtctttacgccacagggcgacggcctgtggctgattaacgaggaagcgtcgacgctgaccttctatcatctggataagcaaagcggcctgctgcgtgaaggcaaaactgtctccgcgctgccggaaggttataaaggcaccagctttgccgccggacttgtgttgagcaacgatggcaaacagctatatgtcgccaaccgcctgcataacagcattgcccacttcacggtgctggccgacggcagcctgagtcaccaggaagatatctggacgcgtggcgattatccccgcaccctgacgctggataatcaggggcagtggctgtacgtcatgaaccagcgtagcgataatattacccgcttcagcgtggcgccgaaggatggcaaattaacctttgcctccgactatacgccggtcggtagcccatcgcagatggtgatatccgcccaaccctgagccgtaattacaaggaactgacatgcgatttcccaaccaacgcttagcgcaactcttcaccctgctgcgaaatgaaacgctgccgcaggatgagctggcgcaacgcctgtcggtttccacccgtaccgtgcgcgctgatattaccgccctgaatacgctgctggcgcaatatggcgcgcagtttatccttaaccgcggtagcggttatcagctgaagatagataatccgacgagtttccaggcgctggaggagaccgcgccgaaggcgcagcacgtgccgcgtaccgcccaggatcgcatcacgtttctgctggtgcgtttcctgacgtcggcgttctctatcaagctggaagatctggcggatgagtggttcgtcagccgcgccacgttgcaaaatgacatggttgaggtgcgcgagcgcttccagcgctatcagctgactcttgaaacccgcccgcgccacggcatgaagctgttcggcagcgaggtgtcaattcgcgcctgcctgaccgacctgctgtgggagctgacccagcaaggcgatatcgcgccgccgatcggcgccgaggcctttgcggcggaggtgccagcgctgctggagccggtgctgcaggagacgctcacgcggcatcatattcgcctcaccgacgccggcgagcgctttgtctgcctgtatggcgcggtggtggtgcgccgcgtcagcgaaggctacccgctggccgatttcagcgctgaagatgtggcgcagaacgtccgcgacgccgcgcgcgagctgacgggcgagctgcagcggctggccgggaaacctttatcgcccgccgaagaagagtggctatgcgtgcatatcgcggcccgtcaggtgcaggatgtcgatccggaaactatcagcgccgacgatgatgaagcgctggtcaattacatcctgcgctacatcaacagccagtataattataacctgctggacgacgcccagttgcatgccgatctgctgacccacattaaaaccatgatcacccgggtgcgctaccagatcatgatccccaatccgctgctggataacatcaaacagcactacccgatggcctgggatatgaccctggccgcggtctccagctgggggaaatatactccgtacaccatcagcgaaaacgaaatcggctttctggtactgcatatcggcgttgggctggagcgccactacaacatcggctaccagcgtcagccgcaggtgctgctggtgtgcgataccagcaatgcgatggtacggatgatcgaggcgatcctgcagcgtaaatatccgcagctggagatcgccgctaccatctcccagcgcgagtacgaacagcgggacgcgatcgaggcggatttcgttatctcaacggtgcggatcggcgaaaaagacaagccggtagtgaccatcgcgccgttccccaccgactatcagctggatcaaatcggcaagctggtgctggtggaccgtacccgtccgtggatgctgaataaatacttcgatgccgcccacttccgggtggtcgataagccgatggatcagcaaacgctgttcgccgagctgtgccagcagctgctggaggaaggctttgtcgatgcggagtttcatgcttcggtggtggaacgtgaagcgatcgtcagcaccatgctgggggatggcattgcgctgccgcactccctggggctgctggcgaaaaagacggtggtttataccgttatcgccccgcagggcatcgcctggggcgacgaaaccgcccatctcattttcctgctcgctatcagcaagcgcgagtatgaagaggcgatggcgatctacgatattttcgtgactttcctgcgcgagcgcgccatgagtcgcctcgccgcgacccgcagcttcgatgagtttaaaacggtggcgatggagtgcgtcagccggttttgagaggcgttttccagattcgagtgtaattcaattgtaatgctatgctgcattacaaaattcccctttccggaggcataatggccacgctcaatgttcgactggacgataaactcaaaaaagaggcttatgccgtgctggagaaactcgatatgacaccaacggaggcggtacgcctgctgtttcaatacattgcggaaaatggccgcatgccggtgaaaagtatgaccatcagtgatggcgaagcggcgttattacgcaccgttcgcgaacggctggaaaacccacggccgggggttaaggtgagtctggatgacctatgaactggagtttgatccacgagcctggcgcgaatggcagaagcctggcgagacggtcaaaaaacagttcaaaaataagctccagcagattgtgcagaatccgcgaattgagtcggccaggctgagcgatttaccggattgctacaaaatcaagcttaaggcgtcaggttatcggttggtgtatcaagtacgagatagtgtggtggtggtttacgttattgccattggcaaaagagagaaagcggccgtttatcatcaggcgaataaacggctctaaacgctatcgcaaatgatgtacgacctggttgctgctgccgcgccagataagcgccggatctttcaaatcctgcacaaacttaccgtcaaccagcacgttaatcaggttcacgacttccatctgctcggcgttcagttcgtcaatcttatagcccgtccagacccagatatctttgccggggcattcggcgcgcacgcgctgaaccagctttaaaatatccgcgacgttctgcggatgcagcggatcgccgccggagagtgaaagcccctggcgtttgatgcgggtgtcgttgaggtcggcgatgatgcggtcggccatctcagcggtaaacggcataccggagttcacccgccaggtacttttgttgtagcagccggggcactcgtggacgcagccggagacaaacagggtgcagcgggtgccggggccgttgacgatgtcgacggggtagtactggtgataattcattttcgcttctcaattaacgccatagccgctttggctgcgctcgctcaccccagtcacgtactgaatgtacgctcctggggatcccttcgtttgccgccttgctctgacgttaattgctttgcgaaaacgaaggagtgcggccatttcctggcgtcgctgcgctcggccgggctacaacagtggtagtggtagcccggataaggcgctgcgcgccgctatccgggaaaagcgcattggtctttaaccaatctgcccattacccaggtgcttcacgcggcgcttcacttcttcctgcttgccggcgttgaacggccgcgcgtccgggctgccgagataaccgcacacccggcgggtaacggaaacgcgggcggcgtcgtggttaccgcatttcgggcaggtaaagcccttgctggtgcactcgaactcgccggtaaaaccgcactcgtagcactcatcgatcggcgtattggtcccgtagtacggcacgtgctgatagctgtaatcccacacgtcttccagcgccttgaggttatgctggatattcgggtactcgccgtagcaaatgaaccccccattggccagcggcgggtacggcgcttcgaaatcgatcttatcgtacgggttgaccttcttctccacgtcgaggtggaagctgttggtgtagtaacctttgtcggttaccccttccaccacgccaaactcggcggtgtcgagacggcagaagcgatcgcacaggttttcgctcggcgtgctgtacaggctaaagccgtagccggtttcttccttccacaaatcgacggcgtcgcgcaggcgctggacgatggccacgcctttctcacgcagcgccttgctgtcgtacatatgctggttgccgtacagcgcattgatggtttcatggataccgatatagcccagagaaatggacgcgcggccgtttttgaagatctcggagacgtcgtcgtcggctttcagccgcacgccgcaggcgccttccatatacaggatcggcgccacgcgagccttcactccttccaggcgggcgatacgggtcatcagcgctttacgcgccagctgcaggcgctcgtccagcagcgcccagaaggcggcttcatcgcctttcgcttccagggcgatgcgcggcaggttgagactgatcacgccgaggttattgcgtccatcatgcacctgctcgccgttctcgttttcccataccccgaggaagctgcgacagcccatcggcgttttaaacgacccggtgactttcaccacctgatcgtagttgaggatatccgggtacatgcgcttgctggcgcactccagcgccagctgtttgatgtcgtagttcgggtcgccgaacttatggttcaggccgtcgcggatcgcgaacaccagtttcgggaacaccgcggttttgcgatttttaccgaggccggcaatgcggttgcgcagaatcgactgctggatcagccgcgattcccagctggtgccaaggccgaacccgaaggtgacgaacggcgtctggccgttggcggtatgcagtgtgttaacctcatactccagcgactggaaggcgtcgtagcactctttttcggtacgggcgcgggcatagccttcggcatccgggatctgccactcttcggcgattttgcgatgctttttgaagctttcgctgacgaacggcgccagcacttcatcgatgcggttgatggtggtgccgccgtaaatatggctggcgacctgggcgatgatctgcgccgtcaccgcggtggcggtagagatagacttcggcggctcgatctccgcgttgcccatcttaaagccctgggtcagcatgcctttcaggtcgatcagcatgcagttgaacatcgggaagaagggcgagtaatcgaggtcatgatagtggatcatgccgcgctcgtgggccatcaccacatcgtggggcagcaggtgctgccgggcgtagtgcttggcgacgatcccggccagcaggtcgcgctgggtcgggatgactttactgtctttattggcgttttcgttgagcagcgcggagttggtctgctcgacgaggccgcggatctcctgattgagacggccgcgcttctcacgctggctatcgcggtcatggcgatactcaatgtaggcgcgcgccagctgcttataggggccggacatcagctggttttccaccgcggtctggatctcgttgatgtcgacctgggcgcggccctgcatttgttggctaacgacttctgcgacggtggcgcaatagtctgcgtcatcgactcccgctgctttagctgcacgcagaattgcttcctgaatgcgctctgagttgaacggcactttacagccatcacgtttcatcacatgcggtgtcatgatcactccatatatagaacaggttatccacagaggcggaggttatcccgaaggcgctgcacgctacggctcgtgctgtttaccttcggatccggcccgttttatccacatctcatcaccgccagacatcgacaagatatggtgacataatagacgattaatacaacatgttgggccgaggcgcattttaagttctatatgtagtgatttgcatcaaagatgtttgcgattttattgacccagaacaaggtaaaaaggtgagagtacggatgatgggcgctggcgataaatgtaaatttaggcgcttaaaatataagcaaaaatcgagcccgttcaggcatgaaacgggcaaatattcaggcaatcaacgtatcgttaagcagatcgaccagcagtagcagggcatagcgagcctgctgcgggtcagcgggcagcggcaggatggcgctggccatatcgccaagggcgtgctgttccggcgtcagagcaataatggtcactccctgcgtgcgcgcctgcaaggtggcgctttgcaacacagggttggcctcggcagtggccagcaccagcagcagatgatcgtcattgagggtgctggcggtcagccgcatcagcgccgcatcctgacagagattaatcgcgattccggagggcagtagctgatgctggagcagcgcggccagcgtcacgtcctgggcgccaagggcgaagcagtgtaccgcacgggcgctcagcaggcgcgatttacacttttccaccgccgcttccgcggtatggccgagctgacgagttagggtaacgccaaggctgctaagtttgtcgcgccaggcgacgggcagggcggcgctgtccggcgtaagccagctggcgcgccgttcgctggcctgcgccagctgtttacgcagatcacgaatatcatcgcagcccaccgagcgggcgaagcgggtaatggtggcagggctgacccccgcgctggctgccagctcgtcaatagaggcgctggcggtaaagcttagattttgtagaataaaggtggcgacgcgcgactcctgggcactaaagcggcgcattccttcctgcagctgacctacgatatccatcctcatgttccctttggcaaaacccgcatttgaaaatatttttcaattatcgactgtctctctttatagcactcacgccgcatatttcctatggtcagagcagtaaagggtgacaccctggcgataaaaatgcgcaaaaattgagcctcgatcacatcggtgaaaattattttcatatagccttcactatcacacaatattaacaatatagtcgtccaggccctgagggctgaagcgataacacgtaaaggggaagcgcaatgccacgaatcgtactctgttgtgccgcaggcatgtcgaccagcatgctggtgaacaaaatgaaagcagaagcccagcagcgtgcgctggcgctggaaatctatgcggtggcggtggcggaatttgaacgcgaattgccacacgccgacgtcatcctgctcgggccgcaggttaaatatgaagccggacggctaaccgcgctggccgcgccgcagggcaaggcggtggcggtgatcgatatggctgactacggcatgatgcgcggcgctgcggtgttggataaagcgctagccctgctcgaacactaattttctcatcccgtttttcatcatcatcacgtgcggtcctggcgatcgcgcgcggcgctctgtatgccgaaaatccgaaaagaggacactatgcaagcactgaaaattgccgttatcggcggcggcagcagctacacgccggagcttattgaagggattatcgttcgttacgagcagcttccggtcacagagctggcgctggtagatgtcgaatccggccgggaaaaggtggagatcatcgccgcgctgacccggcggatgctgaaacataaagggctggagcaggtggcggtcagcgtccactttacgctcgatgaggccatccgcggcgccagctttgtgctgacccaactgcgggtcggacagctggcggcgcgcgccgccgatgagcggctgggtctcaagtaccacctgctgggccaggagaccaccggcgtcggcggttttgccaaggcgctgcggacgatcccggtgatccttgaggtggcgcgcaaagtggaacagctggcgccggaagcgttcattctcaactttactaatccggcggggatcgtcaccgaggcggtcagccgctacagcacggcgaagatcatcggcctgtgcaacgtgccgatcaacatgcagcacatgatcgtcgggatgctgggcgcccaggagtccgaagtaaaactgcgctttgccgggctcaaccatatggtttgggtgcataaggtgctacaggggcgcgaggatgtcaccggcaaggtgatcgacatgctgtgcgacggtaaggcgctgtcgatgaacaacattaaagagctgccgtggccggcggaattcctgcgcgcgctgaaggcgattccgtgcccctatcatcgctatttttggctgacgccggcgatgctggcggaagagatcgccgcggcgaaaaccaagggcacccgcgccgaacaggtgatgaaagtcgagcaggagctgtttgcgctgtacgccgacccgcagctggaagaaaaaccggagcaactgagctttcgcggcggcgcctactactcggaggtggccgtcgagcttatcaacgcgatctacaacaacctgggcgcggagatggtggtgaatacccgcaacaacggcgcgattcatggcctggatgatgatgcggtggtggaaaccaacagcattattgatgcgcaaggggcgcggccgctggcgttcggcccgctgccgccggcgatgaacggcctgacccagcaggtgaaagccttcgagcggttgacgattgaagccgcggtacacggctgtcgcgaaagcgcactgctggcgctggtggccaacccgctggtcggtaacgtcaccgatgcccaggcgctgctggatgaagtattaaccatcaaccgtcaatggctgacgcaatttaactgaccgctatttcccctcgggagcacaccatgtcgaatacaagctggattgaacgttacgtcatgccggtggcgctgagaatcgccgggcaaaagcacgtcctgtcggtgcgcgacggcatcattctcaatatgccgtttatgttgattggctcattcttcctgattttcgcctacctgccgatccccggctatgccgacatgatgagcggcctgtttggcgaggtctggcgcgataaaatgctgtacccggtgaaagcgacctacgacattatggcgctgatttccagcttcggcatcgcctaccggctggcggagaagtatcgcactctcgatccgctgagcgctggggcgatgtcgctggtggccttcatgatgacgatcccgcagaacacgctgtttacgccggtacacggcgcggcggaggtgattaaaggggtgatcccggtgagcatggtcggcagccaggggctgtttgtcgccattgtcatttcgctgctgtcgacggagatttatcgtttggtcgccagccgcaatctcgttatccgcatgccggacggcgtgccgccggcagtggcgaaatcattccttgccctgatccccggcttctgcgtgctggcggtggtgctggcgctgcgcctggcggtcgaggcctcgccgttcggcgatatcaacagtatgatcgccaccctgattggtattccgatgcaccacgtcggcggtacgctgccgggcatgattatttcagtcattttgattggtattttgtggaccctgggcctgcacggcgacgcgatcgtactggtgtttatccagccggtatggctgtcgaatatgtccgagaacctgacggccttccagaacggtcagccgatcccgcatatcattactcagcagttttacgatctgtggattgcccccgggggtaccggcgcgctgctggggctggtgatttttatgttgctgcgtagccgtagccagcagatgaagcagctggggaaaattgccgcgcccggggcattgtttaacatcagcgagccgatggtgtttggcatcccgctggtgatgaacccgtactttttcctgccgtttattttaacgccggtgctgctggtgatcgtgtcctataccgcgatggcgaccgggctggtggcgccgcccgccggaatcgcgctgccgttcaccacgccgatcttcatcagcggctatctggcgaccggagggcatatctccggcacggtgctgcaggtggtgaatttagcgatttcgctggtggtctactatccgttcttccgcgcctgggatcggctaaaggcaaaagaagagcacgcctcggcgcaaccacaagcgagcgctgcgattgctgatgccgaccgcgcataacttccagcctgacgaatcgtagccccggtgagcgttgcgccaccggggaaaagcgttatccctgcagccaccatatcgcttcgaacggccgcagcgtcagcccggtcgggcgcggggtggtctcggcatagttgctgatgatcatcttccactcgcccggggcctcagcgggctgccaggcctgcagctcgcggctcaggttagcggcgactaccagcgtttgcccctgccactgacgacgatagcaccacagcgacggatgctccggcagcagatcctcgtaatcaccccaggtcagtagcggcagggttttacgcagcgtaatcagctgctgataggtataaaacaccgaatcggggtccgccagcgccgcctcgacgttgatctcctggtaattatcgccaaggccgatccacggctcaccgtcgctgaagccaccgttctcgccggcgtgccacggcatcggcgtgcggctgttgtcgcgcgacttgctggcgaggatcgccagcagttcgtccgggctttgcccctgcgccgcacgttcgataaacatattgtggctttcgacgtcacggtaatcgctgatgctgctgaagtgcggattggtcatgccgatctcttcgccctggtagatatagggcgtgccctgcatgccgtgcagcaccatcgccagcatcttcgccgccgtcacccggtactcgccttcgtcgccaaagcgcgacacgatgcgcggctgatcgtggttacaccagaacagcgcgttccacgcccgattgtgcattccccgctgccagtggcggaacagcgccttcagcgccacatagtccgggcgggcgagggtccatttctctccgccgggataatcgacctttaagtggtggaagttaaaggtcatcgacagctcgcggccgtccagcgcggcgtactgctggcagtgctccagcgaggtggaggacatctcgccgacggtcatcaggttacgcggggtgaagacatcgcggctcatctcctgcaggaactcatgcacccgcgggccgtcggtatagaagcggcggccatccccgtccagatcgcagggaaaggtctggtcttttgagatcaggttgaccacgtcgaggcgcagaccgtcgacgccgcggtcagcccagaattcgcagacctttttcagctcggcgcgcaccgccggattctcccagttgagatccgcctgctcaatggcgaacaggtgcagataatactgcccgctgtcggcgtgccactgccaggcgttaccgccaaatttggagcgccagttgttcggcagggcgtccggttcgccatcgcgccagatatagaactggcggtagggactctccttattcagcgactgacggaaccattcatgttcggtcgacgtgtggttcagcaccatatccagcacgatacggatgccgcgagccttcgcctccgccaccagggcgtcaaagtcggccattgtgccgtaggagggatcgatggcggtgtagttcgccacgtcgtagccgttatccacctgcggtgagacgtagaacggcgtcagccagatggcgtcgaccccaagcttttgcagatagtcgaggcgggcggtgacgccgcgcaggtcgccggtaccgctgccggtggtatcctgaaaactcttcggatagatttgataaataacgccgttttgccaccagtgggggagatgattcatagtactttcctgctgcaacgaggggcgccaaaggcgccccgaaagaagaagttagacaatctgcaaggtgccctgacggtacttgcgctgatacaccacgctggtgaggataatcggcaccaccaccgcgatagccatcgccatggcgtacacctgccagtaggtaggctggatggagaggatccccggcaggccgccgacgccgatgccgttcgccagcacgccgttcaggccgcacagcaggccggcgaggccagagccaatcattgcgcacagcatcgggaagcggtatttcaggttgataccgtacatcgctggctcggtgaccccgagataggcggagatcgccgccggtaccgagatttcacgttcattctgcttgcggctggcgatgatgatgccgaccaccgccgacgcctgggcaatattcgacagcgcaatcagcggccacaccggggtaccgcccatgctctggatcatctgcatatcgatagcgagggtggtctggtggacaccggtaatcaccagcggcgcgtagaggaagccgaacagcgcggcgccgatcggcgcgaagctgccggttaacagatggcgtaccgcgaaggccacgccgtcgccgatcaggcggccgaacggaccgataaccgcatgggcaaggaacaccgcgaggatcagcgagcagaccgggacaatcaccaggtagaggtagtcaggcacgatgcgcttgaggcgcgtctcgataaagcctaaggccaggccagccagcagggccgggatcacctgcgcctggtagccgactttggcaatggtaaacaggccgaagttccacacctccggcacctgctggccgaggagataggcgttcatcagctgcggggagacgagggtgacgccaaggacgatcccgaggatcggcgtgccgcccatcttcttcaccgctgaccagcagatccccaccggcagatagaagaagatcgcctcgccaatcagccacaggaagtcatagatggttttcagcgacgggtgcatctgggccagcgtctggccattgctcatgggcaggtcgccgataacgttgcggaaaccgaggatcagaccgccgctgatcagggccggcagcaggggaaagaagatctcggcgaagtgcgagattaactgttcatgccacttcatattttgccgcgcggcctgcttgacctgctctttgtcggcggaggtctggccggtggtcgccagcagggccttgtagtaatcgcccacctcggtgccgatgaccacctggaactggccggcgttagtgaagcatcccttcaccatgcgcagctgctcaatttcttttggtctggcgatggccgggtcgttcagcacaaagcgcaaacgggtaatacagtggctgacggtggcgatgttaccgcgcccgcccaccagttcgatcagtttatcgatgtcctgctggtttactttgctcatgatgaagcctcaaaaacagaggggagagatgccgtttttaccttgagggcatcctaaccgttccgcttaatttgcaaaatgggaacgttcccgaaacccggcgacgatcacataaatcgcccgagcgagattaattgagggcggcgggaatcacgatctggcggggatcgacgctgccggcgatctgctcgatcaactgccgggcggcccggcgtccggactcggcatagcccggatcgacggtcaagatttccgggtggagaaacttcatcagcggcgtgctgccgacgctggcgagctgcagcgcatcgcgaccctgctgctggaggtacttgctggcgccgagggcgagggtatccgtcgcgcagaccagggcgctggtttcagccatcagcacgctggcgacggtgtcatatccctgcttcatgcccagccccggcagggcggcggtgggcgtcagacgatgctttttacagaaggcgaggtaggccagatggcggcgttcgccggtggtgacgtcgctgtgcggtacgccaagaaaactgatgtggcggtgtccgcgatcgtagagccgctgcatcagcagcgtgatggccccctcgtcgtcatagcacaccgaggcgaagccgggagcgtcgcgggccatcagcaccagggtgtcgcgccagggggcgagcatcgcttcgtcgatgccggtaaaaccgaacagcaccacgccgtcaatattgcgccgggcgagcatgccgagatgctcctccaccaacgccggggagaactggctctccatcataatcggatcgtaaccctgctcataaaaggcgggcagcatggtctgcacggcaaggttttccgacagcgaatcgagacgggtgacgataatcgccaccactttatcgctctggccgcgcatggcgcgggcggaacgggagggcgagaaaccgtgctgctgcatcaccgcttcgacgcgctcgcgggtccgttcgctgaccccgctctcgttgttaaggacgcgggataccgtcgatttccctacgccgcttaagcgcgcgatatctttgatggtcagccggttctgcatgcggaattctcgtcagggatggtagaagtgagcctaatgctactcaaccaaaccgcaatgagcaaagtctggtttacgttcggtttagttgcgcgggtttatcatcgccattattgccacacaatcctcagcgagggcgctataattcgcgccgtttatattcacttaccggagatagttatggaccccgatcccactcctcatcctcgatggagcaacctttctttccggtaagcctgtttaacactgctttaccggaaagcgtaaagcagtgacgtccttgatgtccctgccataaaaataacatgcctgacaggtaggttttgctacgcccgtcggcaacgctgcgttcgctttggcgagcgcggagggactgtttatgctgaaaaattatacccggcagctgttcgcgcagcttagccgccatctgccacgtcgtttagtccagcgcgatccgctgccggacgcccgccatctggcgagtggccccattcctgaatcgcttggtcagcattgcctgaacgtggcggcgatggacgaccaggagatctggcgcgcctttgacagccaccctgaagggctcaatgaaggcgaagtggcggcgaaaatcctcaaacatggtgacaaccagatcccggcgcagaagccctccccgtggtgggtgcatctgtggacctgctatcgcaacccgctcaacctgctgctgaccgtgctcggcatcgtctcctattccaccgaggatctgttcgccgccggggttatcgccctgatggtggggatctcgacattgctcaatttcatccaggaggcgcgctcgaccaaagcggcggatgcgctgaaggcgatggtgagcaacaccgccaccgtgctgcgggtggtgaacgagcagggggagagccgctggctggagctgcctatcgaccagctggtgccgggcgacattatccggttgtcggcgggggatatgatcccggcggacctgcgtatcctgcaggcacgggatttattcgtcgcccaggcctcgctgaccggcgaatcgctgccggtggagaaagtggcccgcagccgcgatccgctgcagcaaaacccgctggagtgcgacaccctgtgctttatgggcaccaacgtggtgagcggctcggcgcaggccatcgtcttcgccaccggcggccgcacctggtttggccagctggccggccgcgtcagtgaacaggagagcgagccgaacgcctttcagaaaggcatcagccgggtcagcatgctgctgatccgctttatgctggtgatggccccggtggtgctgctgatcaatggctacaccaaaggcgactggtgggaggcggcgctattcgcgctgtcggtggcggtcggcttgacgccggagatgctgccgatgatcgtcacttcgacgctggcgcgcggggcggtgaagctgtcgaagcaaaaggtcatcgtgaagcacctcgacgccattcagaatttcggcgcgatggacatcctctgcactgataaaaccggcaccctgacccaggataagattgtgctggagaaccataccgacgtctccggcaaggtctgcgagcgggtactgcatgccgcctggcttaacagccactaccagaccggcctgaaaaacctgctcgacaccgcggtgctggagggcgttgagctggatgccgcccgcgggctggcggaacgctggcagaaggtggatgagatacccttcgacttcgaacgccgccgcatgtcggtggtggtgaaggaggatgacgccgcgcatcagctgatctgcaaaggggcgctgcaggagatcctcaacgtctcgacccaggtgcgctacaacggcgatatcgtaccgctggacgacaccatgctgcgccgcattcgccgggtgaccgataccctcaaccggcaggggctgcgggtggtggcggtggcgactaaatacctgccggcccgcgaaggcgactaccagcgcgccgatgagtcggacctgatccttgaaggttacatcgccttcctcgatccgccgaaagagaccaccgccccggcgctgaaggcgctgaaggccagcggcatcacggtgaagatcctcaccggcgacagcgagctggtggcggcgaaggtgtgccatgaagtgggactggatgctggcgaagtggtgattggcagccagatcgaagccatgagcgacgacgaactggcggcgctggccaaacgcaccacgctgttcgcccgcctggcgccgctgcataaagagcgtatcgtgacgctgctcaagcgtgaaggtcacgtggtgggctttatgggcgacggcatcaacgacgccccggcgctgcgcgcggcggatatcggcatctcggtcgacggcgcggtggatatcgcccgcgaggcggcggatatcattctgctggagaagagcctgatggtactggaggagggggtaatcgaaggccgccgcaccttcgccaacatgctcaagtacatcaaaatgaccgccagctccaacttcggcaacgttttcagcgtgctggtggccagcgccttcctgccgtttctgccgatgctgccgctgcacctgttgattcagaacctgctgtacgatgtctcccaggtggcgatcccgtttgataacgtcgatgatgagcagatccgcaagccgcagcgctggaacccggccgatctcgggcgctttatggtcttctttggaccgatcagctcgattttcgatatcctcaccttcggcctgatgtggtgggtgttccacgccaataccgtggagatgcagaccctgttccagtccggctggtttatcgaagggctgctgtcgcaaacgctgattgtgcacatgatccgcacccggcgcattccgttcgttcagagccgggccgcctggccgctgttcgccatgaccctggtggtgatggcggtgggtatcgcgctgccgttctcgccgctggctagctacctgcagctgcaggccctgccgctgagctacttcccatggctggtggcgatcctggcgggctatatggtgctgacccaggccgtgaagggcttctacagccgccgctacggctggcagtgagggacgcgttttcggatgacccacgtaaaaaaggcagccactggctgccttttttcatgccgacgagagcgatcagcgacgcacggcgatggcttcgatctcgatcttcacgtctttcggcagacgtgcgacttcaacgcaggagcgcgccgggaaggtggcgttatgctcggtgaagaacgcttcgtaggtggcgttaacggtagcgaaatcgttgagatctttgacgaatacggtggtcttgacgatatcgccgacggtgaggccagcggcttcaacgatcgctttcacgttgttcagcgactggcgcgcctgcgcggacacgtcttccgggacgctgccggttttcgggtcgaccgggatctggccagaggtgatgatcatgctgccgaggtcaacgccctgaacgtaggggccaatcgccgctggtgcattttccgtcgcaatagttttgctcatgttatctccagatgaactgagtaatgttacgcaaaatcattcaggttgccgccaggcggtaagcgctgtatcgccggcgcagacgccgcctgaaggacgaagcgtagggtggtagccattatagggaggcctaccaccaataccaaccgcatttagttggccagcaccacataatgagaaaactctttttcgcagtatttgcatttgagtgcgatgtcatcagcgcgttttttcactgcaaaactggaagaaaccggttcggcgtggctgatacagttgctgttcggacagaccagcacgctgtcgatacgatccggcaggctcgggcgggatttgcccaccacttcgtaatcatcaatgcggtttaccgtcgcctgcggggcgtacagcgacagctggttaacctgctcgtcggtcaggaaggtgttctcgattttaatcaaatccttgcggcccatttcgccggagggcaggttcaggccgatggtgatgcgctggtcggtttcggtcagtttgaacagggtgagcagcttaaagccgacctgcgccgggatatggtcaatcacggtgccgcgtttgatcgcttctacctgcagtttattgtcgtgtgtcatctctcattcccccttacagtgccagctcgctattcagtaccagtgccagtaacgcctggcgggcgaagatgccgttaccggcctgctggaagtaccaggcgtgcggtgttttatcgacatcggtggtgatttcatcaatgcgcggcagcgggtgcagcactttcatgttggcgcgcgccccttcgaggtcggcggcgcgcaggacgaactgcgctttgacgttggcgtattccgacggatccagacgctctttctgcacgcgggtcatgtacagaatatccacttccgccatcacgtcgtcgatggcgctatgcaggctccaggcgatgcctttttcatcgagcatatcgaggatgtactgcggcatggccagcgcgtccggggcgatgaagtagaagcggttgccgttgaatttggccagcgcctgggtcagggagtggacggtacggccatacttcagatcgccgaccatcgccacgttgaggttttcgaggcggccctgggtctcctgaatggtgaacaggtcgagcagggtttgggtcgggtgctggttagcgccgtcgccggcgttcagtaccggcacgccgccggagaattcggtcgccaggcgcgcggcgccctcctgcggatgacgcatcacgatggcgtcgacgtaggtgctgatgacggagatggtatccgccagcgtttccccttttttgcccagtgaggtgttggcgctgtcggaaaagccgaccacgctggcgcccaggcggtgcatcgaggtttcaaaagagaggcgggtgcgggtcgaggcttcaaagaaacagctggcgataaccttatgcttcagcagctcgggttgtggattggctttcagctttgccgccgtcgccagcaccagttcgaggtcttcgcggctgagatcgtttatggaaatgatatgtttttgatatagcgggttagccatgcttatctcctgacgcctgggcaaaaaaaaagccccttaaataaggggcttcgggaatccaatgagcaacggaaagaaaaacggcaggccagcgtctgcattgagacgcgctaagacagaatgtcgtacgcaattggccatgcttcctcccggcaaaacgactggcattatacgcagaccgttatgacgatcaagcgattcattcacaaacaggtaatcgtttgcctgtcgaaaagtgcgccagcgcaaagaagcgtgaaactgtactggtatggcagccgcgatgggggtataacacgataaaatgaaatgctgttttatatttgaggtaagcaatgattattggcaatatccaccatctgcagccatggctgcctgccgcgctgcgcgaggctatcgaacacgttatcgctcaggtcagcgaggcgacgccgctgggtaaacacgctatcgacggcgacaacctgttttatctgatttctgaagacaccaccgagccgcaggccgcgcgccgcgcggaataccatgctcgctatctcgatatccagattgtgctccgcggcagcgaggggatgaccttcagcaccttgccgccaggagagccgcagaccgactggctggcggagaaagacatcgcttttcttgccgaaggccagcaggagaaaacggtgatcctcaacgaaggggactttgtggtgttttatcccggcgaagtgcataaaccgctgtgcgccgttggcgccccggcgaaggtgcgcaaagcggtggtgaagatgctgatggtttagttgacgagcttttttacccagagctagcaattgtcatattgtgacaattgctattctttgtttttcctggctattcccgcttttttacttcttattccctctcatttgctgcttcagccaaacgctcataccgagcgcattgtgcaaattttgatggcgatctcattaatacgttatataacgtattaatgttgtttccgctaatttgaacaatcaataatgagatctggagttcttactgtatgaatactaaagaaataattaatgccgttgctaaagagatagaagacaaaggcggaatccgccaagtgttccttgttgcctgcggcgggtcattagtggatatgtatccggctaagtacttcctggatagcgaggcgacgaagcttcatgtcggcatgtataccgccaatgagtttgtctacgcgacgccgaaaacgttaggggagaattcgctggttatcgtctgttcgcacgggggcaacacgccggaatccgtcgctgcggctaagcttgctcaacagcatcaagcgcatactattacgctgactcacaacgctcaggcacagttgatcgaatacgccagtcacaacattctctatgcctggggtaacgataccaatgtggtcgataatccgatggcgattatcctcaacctgtgcgttgatacgttgcagcaggtggaaggtttcaataattacgctgatttccaacagggaatgacccaaattaatggcgtcattgctcatggccgtcagcaggttgcggatcgctgccagcgttttgcccaaaaatatcaagatgaaaagctcttctatatcctctccagcggagcttcttatggccatgcttatggttttgctatctgctcactaatggaaatgcaatggctacatgccgcacctattcactccggtgagtacttccacggaccttttgaagttacgaataaagagacgccgtttattttattgatgaacgaaggccgtacgcgggcgatggatgagcgagctttggccttcctcaccaagtatgcagaaaaagtggaagtcgttgatgctaaagaactgggcatcggggttcttcctccgtcagtcgtggagtttttcaacccggtactgttttacagcatcatgtgtgaatatcgttctgcgcttgccgacattcgccagcatccattggatacccgccgctatatggggctggtggaatactaaggggaattatgatgaatgtgattggaattggcgataacgtcgtcgataaatatgttcatactcagactatgtatcccggtggaaatgcgctgaactttgccgcttatgcggccatgctggggcacaatgcggcctatctggggatttttggtaatgatgccgctgcggaacacgttatgcaggtgctggataaagttggcgtcaagtggccacactgtctgcaggtggcaggagagaatggctgcgcacagctgaaaatcgaagagggagaacggatatttcttggttcgaacgccgggggtattcgcaagacaacttcgatggattttatttttcagcatgagcaatacctgcgtgagtttgatctgatccatagcggctgttatagctatatggagacgcacttacctcagttacgcgagctcaacattcctgtctctttcgatttttcagatgactttgtactggagcaggcgctgccgctgtgccgttacgtcgacttcgccttcttctcatgcgccgactacagcctggcgcaaacacgtgaaattgtgcaacaagcgcaggccagcggaagtcgcattgtctgcgcgacgcgtggagatgaaggcgcgattttatttgacgggcaggattggtatcagcaggcacccgattacgtcactcccgtcgatacaatgggggcaggtgatgcttttattaccgctttcatttgccattttctggcccaacctacgggtaacaagcgcgaagcgattaccaatagcctgcaaaaagcagcagctttctcggcacaaatttgcctgaaagaaggggcatttggctacgggactcactactaacctataacgccatctctcatttttccgtactgatttccgtccgctagccgggcggaaagggggattcctgcgctttttccgtgaggaaagaattatgcatagtgatgctgctgatttgattttacgttctgatgctatttttactgctgccagaaatgagctatttagcggatatgtagtcattaaaaacggcgctatcgcggcgatgatagcgaatggggaagatattcaaacctggagaggtgaaagaactcgctttatcgaacttggcgatcgcctgatttgtcccggattttgcgataatcacacgttttttaccggctatatgagcatgcagcgtggcgtcgatctccatgccgcccgcgatagtaatcatgcccttgaactattacaggatgcagaaaaacttctccctgaggagaaaagcctctatggctggggctggtctgctgcccgttggggagcggtgcctgatgccagactattggatgacgctttcccgcagagaccggttgtcgccattaacgatgacaaaagctattgctggatgaaccgtgccgccgtggagctttatggctttaccgctgaagagtgcagcgcggaggcgagaatcgcattattggatgagatgctgtctgataccgcacagttaaaaaaagaaatgcgggcatttatggcccgacttgccgggcagggaatcacggcaataaaagacgtttgtttcaacgatgcgccgcagttgatgaatgcctgggatgaactggaaaaagaggatgcgctattgctgagagtaagcattgtttctcagcccgtatctgcgcctgtcgatcttgctttcggtgaacaggcccgacgccgctttcattcgccatggctgcggtttcatggctttaaatttatggtcgatggcgttattgccgatcataccggcgatatgatttacccctatgccgatcgtcccggcacgaacaatgaacgacccgttgattataatgccctgcgccagcaggttttgttggctgatgctcgtggattcaactgctgtatgaatgcggagggcgatgccgcaattcgccgctgtattgatatttttgccgaatgccgtaagcgtcacccgcagagcgtggttagacattctctgagcgatctggaatgtccgcatccaaacgatattcccagaatggctgagctcggcctttttgccgaagtttatgcacaaattctgctccttaacccctgcgaagcaggggcctatatgcgcgaacgctatggggaagagcgcgaagcgcaattctacgattatgccgcactatttggggctggcgtgacggtgactattggcaccgatctgcctctgtttattccttctgttcctgactcgatgtatgccgcctgcagtcgtcagttccctgatggttcacccgtgaatggctggtaccgcgaacgcggaatgacccgacaacagctcttaacggcatggacgctgaatagtgctcgacaccacggcatggaagagatgaccggtagccttgagccgggaaaacgcgcggatatcgcggtttttgaccgtaatttgttgagctgcccgaatgatgagttacggacttctaccgttgtactgaccctggtggatggccgtattacccatgaccttctgtaactctaaaaatgccgaaagacggcaaacataatataaacatcttatcgaggcggattatgcgtattgcaaaaataaagtgggcgatgccacactgctacgctctgattttcttcattattatattagtagcgctgctgacatggtgtattcccagcggcagttttgattatcactcagtgaccttacccggcggtgaaacgaaaacattagtgatcccagggtcttatcatctgctggacaaagtcagcagcgagggcgatttacgtcagggtattgccgccgtactggccgcgccgatggaggggattatcaaggccgccgacgtagtggcgtttgtgctcattgttggtggcgcttttggcattattttacgtactggcgcaattgagcggggtctggtggcgctggctgaacgcctggcaggtaaaggaattttggttatccctatcgcaatgaccttgtttagcctgggaggcgcgacttttggtatgagcgaggaggtgattcccctgtatgcgatctttatctccctgatgttcgcgctgggttatgactcaatgactgcgatcctgattctttttctgggaacccagattggctacgttggcgcaatgaccaatccgttctctgtactcattgcccagggcgtagcgggtattcagggaaatccgcagctttggctacgtgctattgcatggctggtcttcacgctactggcgattgcttacaccatgtggtacgcgcaccgtgttaaacgcactccgcaaaagtcgccggtatatgaaaatgattgtcgcaaccgcgagcagtttttgtcgatacaggatacgtcggtccatttttccatcgccgatcgggtaattatcatcgcctttgtgctggcgctggccgtcatctcatgggggctaatcacgcgtggctggtacatggttgagatcggctctgtgttcctggctctggggctgttttccgggatcgtcgggcgcatgggtattagcgggatggccgacagctttgtcgaagggtgcaaagagtttgtctacgccgccgtagtcataggtcttgcgcgcggtattctggtggtggcggagaacggacgaattatcgatacgttgctatttggtttgtctgaaatgctggaagggttgccgcagtatgcgtttaccactctgatgctattagggcataacgtcatcactttttttgtgccctcatcttcgggcgaggccgcgctcactatgcccgtgctggcgccgttaggcgatttggttggtatcaataaagaggcgatggtgatggcttatcaatttggcaatggcctgacgaacctggtctctcctaccggcggtgtattgctggctgggttgtctattgcgcgcattgggtttggtcagtggttaaaggccattgcgccgctgtttccggtgctgtggatagttagcgctgcttttgctgcgatttcggcctgggtctgaaggatatgcgcgccgtcgtagtttgatgtgcgcgcttcgattataatcctgcttcgcattaatggccgtgctggtacctcttttatgtcgaattttggactgcaacagaatacttccgtaccgttatacaggcagctaaaagataaaatcctcagcgatatttcttccgggaaactcgctgaaggagagaaaatccccaccgagattgagctcagcgaactctacaatatcagccgtattacagtgcgcaacgcagtgaaagagctggtagccgaaggctatttggtaaaaaagcaggggaaggggacttttgtctgtctgcctaaaattgagcgtaaagttgttcacttacttagctttactgccgcatgcgatgctaatcatctaccaacccatagcgtagtgactcgtcgtgagattctgcgggactatcgtaatgcgcgtcagcttcttgagcttgagagcgatgattccgtgctttatatccaacgccttaggatcgctggcgatgcgccgttaatgttagagaataattactactctctgaaacgattaggttttttacagcaggaggatcttagcgggtcgctgtatcagctattgcgtgaaaaatatgcgatcgtgcctacctatgcgggtgaaacgacagtagaaatggtgcgtgcggattctgacagcgcaccgctgctgaagcaaccgcccggcgaaccgttattcctgatgaaaacgctaattctggatagccagcatcagcctattcattatggagaacagtatatcgtcgccgagcgttacacgtttagtttctgatttcagcgtgaaagcgtcgccaccatcaccgctttgatggtgtgcatccggttttccgcctggtcgaagaccacgctcgccgccgactcaaacacctcgtcagtcacctccatgccgccgtgcaggccgtaatcggcagccatctgtttgcccagcgtggtctgatcgtcgtggaacgccggcaggcagtggaggaacttgacctgcgggttgccggtgagcgccagcatcgcgctgttaacctgatagtcgcgcagcagggcgatacgttcggcccatttttccttcgcctcgcccattgagacccagacgtcggtatagataaaatcggcgcctttcacccccgcggcgatatcttccgtcagggtgatgttgccgccctgctgtttggccagcgcggtgcaggtctccaccagcgcggcctccggccagcaggccgatggcgccaccaggcgcagatccagaccggtcaaggcggcggcttccagcatcgaattgcccatgttgttgcgcgcgtcgccggcgtagaccagcgtcatctggttaaaggctttgcccggcagatgctctttcatggtcagcaggtccgccagcagctgggtggggtggaactcgttggtgaggccgttccacaccggcacgccggcgtattgcgccagggtctctaccacttcctggccgtggccgcggtactgaatgccgtcgtacatccgtccgagcacgcgggcggtgtccttgatcgactctttatggccaatctggctaccgctgggccccagataggtcacgcgggcgccttgatcgtatgcggcaacttcgaaagagcatcgtgtacgggttgagtctttttcgaagatgagcgcgatgttttttcctgccagtttctggacttcgataccgtttttcttatcggctttcagctttgccgccagctcgagcagggcggtgatttctgcaggcgtaaaatcgagtaactttaaaaaatgcttctggtaaaacgcagacatggttccctcacctggtataggccactaattgaattaaaattcaatttatatgtatgaatattcatttgcaagtctgtgatcgaaatctttcactgagaagtggaggcaatgacggcggtatgtgacaatagggataactgccgcacattatgaggaacgagccatggcaaacccggaacacctggaagaacagcgtgaagagacgcgtctgattatcgaagagctgctggaagatggcagcgatccggacgcactgtacacgattgagcatcacctctctgcagacgatttcgaaaccctggagaaagtggcggttgaagcgttcaagctgggctacgaagtgaccgagcccgaagagctggaagtggaagagggtgacatggtcatctgctgcgatattctgagcgaatgcgcgctgaacgcagacctgatcgatgcccaggtggaacagctgatgacgctggcagaaaaatatgacgtcgagtatgacggttggggcacctattatgaggacccgaacggtgaagacggcgacgacgatgacgaagagtatgtcgatgaagacgacgatggtgttcgccactaagtcgcaaatgtcgtagatggatacggcggcgcctgccgccgtatagcaaggaactttcatggattacccgcagattctttccccgattatcagcttcctgcactgcccgacgccgcaggcgtggattgacgaagcccgcaagccggaaaacctgccgctgctgctaaccgaccatatggtgtgcgagctgaaagcggcgcagaacgccatgctgctggtgcgtcgctacgtcgcggataaagctgacgccgacgaactgttggcctgcctgaagccgtacgaagacttcacctaccgccgggggccggagccggattttgtcaccctgcataaacggatcaacaaaagcgccatgccgcagaccgacgacccgtggggccgccagctgctggacagcatgattttgttgattaaagaggaactgcatcatttctggcaggtgcgggagatgatgctggcgcgcgatatcccctacgtcaaaatcaccgccagcaactatgcccgcggcctgcggcgcgaagtgcgctcgcatgagccggtgatgctgatcgataagctgatctgcggcgcctatatcgaggcccgctcttgcgaacgctttgccgccctggcgccgtggctggacgacgatctgcaaaagttctacctgtcgctgctgcgctccgaggcgcgtcactatcaggactatctggatctggcgcagaagattgccggagaagatatcagcgagcgggtgcgccagctcggcgaggcggaagcggcgctgatcctccgtccggaggccgagttccgctttcacagcggtgtgccggtagcggcgtaacccacgatattcgggccctgtagtcactaacaccggcagtttcagtagccatggggagagatagcgttgagagcttcagctcgcaatggtacgggccgtaggtcgggtaaggcgttagccgccacccgacaaaaaaacggcaccgcgagcacgggtaaggtgccagcggtgccatccgggacataccccggctcgcgctacgcttagccgtgtagccccggtaagcgtagcgctaccggggacgcctgcgatatcgaggcgctacagcgttttcagcatccgcacttcacagtcaacgtggccggtgcagcccagcggtccgtcaatgtgctcgaagccgagatgttcatataagccgatcgcctccgtcaggaaggcggtggtttccagatagcagcgcttaaacccttgttcgcgggcgtagtccagcgccagcagcgccagcttcttcgccagcccctggccgcgggcgctggtcataaaatacattttctgcagctcgcagatatccggctcgctgcaggcgagcggcgcgacgccgccgccgccaaccacttccccctcttgctccaccacccagtaggcggagcccggctggctgtacagctcatacagctcatcgagattcgggtcggcgaccgtatagcctttatcggcggtcaggccatattcagccgagacctggcggatgaccctggcgatggcggcattgtctgccgccgtaatgcgacgcagcaacgtcgccgcggggacgctcgtattcatacaatgactcattacccaaaaaagacgaatgatgatgttaataacatcgcgacaggggaaagcgcaagcgaggatgtttcataaaaaacgccccttgccgggtggcaaggggcgggaggatcacagcgcggcgatcaccgcctgctgctcaatcagcttcgctttcgcttccgcgtagccttccagcttctcgcgctctttagcgatcactgcttccggcgcgcgggcgacaaagccttcgttggccagcttgctctcgatgcggccaatttcaccttcgattttggccacttctttcgccagacgcgccagctcatcttctttattgatgaggcccgccatcgggatcagcagctcggcgccgtcgacaatcttggtcaccgagaccggacctttatcatcggcaggcagcacggtaatgctttccagacgcgccaggttcagcaggaagctgcggttgtcgttcacacgacgctcggcatctttgctgcagccgcgcagtagcagttccagcggtttgcccggagcgatgttcatttccgcacggatgttacgcacggcgacgatcgcctgcttcagccattcggtgtcggccagcgccgcgtcatccacctgagaagcatcgtactgcgggaacggctgcagcatgatggtgtcggcggtgatcccgcagatcgctttcacgcgctgccagatggtctcggtaatgaatggaatgatcggatgcgccaggcgcagcagaccttccagcacggtgaccagagtatggcgagtcccgcgcagctccgcttcgttgccaccgttcataaccggcttggtcagctccaggtaccagtcgcagaactggttccaggtgaactcgtacaggatgccggcggcaatatcgaagcggaagttatccagcgcttcgcgatacgctttcacggtgtggttgaattccgcgatgatccagcggtcggccagggagagcaccatttcgccgccgttgaagccgcaatcctgatcttcggtgttcatcagcacgaagcggctggcgttccacagcttgttacagaagttacggtaaccttccagacgcttcatatcccagttgatgtcgcggccggtagaggccagcgccgccagggtgaagcgcagggcgtcggtgccgtgcggctcgatgccgttcgggaactgtttctcggtacgcttgcggattttatccgccagctgcggctgcatcatgttgccggtacgtttttccagcagctccggcagggtgataccgtcaaccatatccagcgggtcaatgacgttacccttggacttggacatcttctggccttcgtcatcgcggatcagaccggtcatgtagacggtcttaaacggtacctgcggcttgccattttcatctttgatgaagtgcatggtcatcatgatcatgcgggcgatccagaagaagatgatgtcgaagccggacaccatcacgctggtcgggtggaactgacgcagggcgtcggtgttttccggccagccgagggtggagaaggtccacagcgcggaggagaaccaggtatcgagaacgtcttcatcctgacgcagggcaacgtcggcgctcaggttgttttcctgacgcacttcgtcttcgctacggcctacgtagacgttgccgtcgttgtcataccatgccgggatgcggtgaccccaccacagctgacgggagatacaccagtcctgaatatcgcgcatccaggagaagtacatattttcgtactgcttcggcacgaactgaatatcaccgttttcaacggcttcgactgctggcttggccagcacgtccgcgcgcacgtaccactggtcggtcagcatcggctcgatcaccacgccgccgcgatcgccgtaagggacggtcaggtcgtgcggtttgatctcttccagcaggccgagggcgtcaactgccgcaacaacggctttacgcgccgcgaagcgttccagtttctggaactccgccgggatctcgctggagtagacgtcggattcattgcctttggtgtcgtagacttccgcgctttcgcgaatgtcgccgtcaaaggtaaggatgttgatcatcggcagctggtgacgacgacccacttcgtagtcgttaaagtcgtgcgccggggtgatcttcacgcagccggtgcctttttccatgtcggcgtgctcgtcgcccacgatcgggatgcggcggttaaccagcggcagcaccacgaatttgccaatcagatctttgtagcgcggatcttccgggttaacggccacgccggtatcgcccagcagggtttccggacgggtggtggcgaccaccaggtaatctttaccgtcagcggttttcgcgccatcggccagcgggtagcggatgtgccacatggaacctttcgattcgcggttttccacttcgaggtcggaaatggcggtgcgcagtttcgggtcccagttaaccaggcgtttgccgcggtagatcaggtcttctttgtacaggcgaacaaagacttctttcacggcattggaaagcccctcgtccatggtgaagcgctcgcgctcccagtccacggagttgccgagacggcgcatctgacgggtaatggtgccgccggattccgctttccactgccagattttgtcgataaaggcgtcgcggccgtagtcgtggcgggttttcccttcttcagcggcaatcttacgctcaaccaccatctgggtagcgatacctgcgtggtcggtaccggcctgccacagggtgtttttgccctgcatgcgctggtagcgaatcatggtatccatgatggtttgctggaaggcatgacccatatgcaaactgccggtgacgttcggcggcgggatcatgatgcagaagctctcctggctttcatcaccattcggtttgaaatagccctgcttttcccagtgctcgtaaagcggctgttcgatatcttgtgggttgtatgtcttttccattatttccaggttgccgtgttcaggttgaaaccagccatgcggtacgccttatagcgttcgcgcgccagttgtttcagattgtcttcgtaagggacaaagtctatcacttctgtgaaagcggtggcaaaatctgcaaagtttagccgcaggctgataagaatatcccgcgggctgctgttgcgcttttgcggccaggcaatctctaccggcgcgccgcctctcgggccttcgcccgccagattatgcggcacaaagctctccggcggccgcgaccacagcgcctcgtcgaggcgaatcgcctgctgttcatcttcgcaggcgattaggacgcgcttgccgttgcgccaacgttctgcggcaatgtcacacaccagctgctcgacggcgctcaggccgtcgacggtggcgtcattgtccagaagatagaacgttgcgtttttcatatatggggcttcttgttgtggatttaaatgcaaagccgggcggcgctacgcttacccggcctacagtgtgctgccgtttgtaggccgggtaaggcatcgccgccacccggcatatcacatcactcttcgccgttaaaacccgcacgattgagcaggaactgcgacagcagcgccaccggacgaccggtcgcgcctttggccttaccggaacgccaggcggtaccggcgatgtcgaggtgcgcccagttgtacttgcgggtgaagcgcgacaggaaacagccggcggtgatcgcgccgccaggacggccgccaatgttcgccatatcggcaaaattggactccagctgatcctggaactcgtcggccagcggcaaacgccatgcgcggtcgcccgccagttcggaggcgccgattagctcatgggccagcgggttatggttcgacatcaggccggtgatgtgatggccgagggcaatcacgcaggccccggtcagcgtcgccacgtcgataaccgcttccggctcgaagcgctcaacgtaggtcaggacgtcgcacagcaccaggcggccttcggcgtcggtgttcagcacttccaccgtctggccggacatagtggtcaggacgtcacccggacgataggcgcggccgccaggcatgttctcacagcccgccagcacgccgatgacattcagcggcagctgcagttcggcaaccatccgcatcacgccgtacaccgccgccgcgccgcacatgtcgtacttcatctcgtccatgccttcggcaggcttgatggagataccgccagagtcgaaggtcaggcctttaccgaccagcacgatagggcgcgcgtcctcagccgggttacctttatattcgatgaccgacatcagcgactcgttctgcgacccattgccgacggcgaggtaggcgttcatccccagctcgcgcatctgctgttcgccgatcacccgggtgatgacgtttttgctgtaggtatcggccagctgacgcgcctgagaggccagataggcggcgttacagatgttcggcggcatattgccaagatcttttgccgctttgatgccggcggcaatcgccaggccatgctgaatggcgcgttcgccgctggtcagctcgcgacgggtcggcacgttaaagaccattttacgcagcgggcgacgcggctcgcttttgttggtcttcagctggtcgaagctgtacagcgtctctttggcggtttcaaccgcctggcgaactttccagtagttgttacggcctttgacgtgcagctcggtcaggaagcagacggcttccattgagccggtatcattcagggtattgatggttttctggatgacctgcttatactgacgctcatccagctcgcgctctttgccgcagccaatcagcagaatgcgctcagacagaatgtttggcacatggtgcagcaataacgtctggccaggtttgccttccagctcgccgcgacgcagcagggcgctgatgtagccgtcgctgattttatcgagttgttcggcgatgggggagaggcgacgtggttcaaagacgccgaccacgatacaggcgctccgctgcttctccgggctaccgctttttacactgaactccatgcactatgctcctgaatcttaaagacaacagtggtggctacggctatactcgtcgcctttcaagttgcagatgcgccggctgcgcctgcttaccctgacgtggcacattgtgcgcgccaggggccacagccctgctgccttcttacaactcgaaatccattgagtatataattgcaagctttcgtaactcatatccgctgttgcggtgacttcgtgttaatcttaacgttattaaggcctgggttcgtcagaaaagatcctgacatgcagaaccgatgagtcatttaatcttagcgacgttttcgacgaccaaagagaataaatgacgtttaagccatgaaacaagcaattttcctgcactaaaacgggtttttacgggcgtatttatagtgataatcataagatatctggttcgtgagacgctgaaaagccagttggcgatcctattcatcctgttactgattttcttttgtcagaaattagtcaggatcctcggcgccgcggtggatggcgatatcccaaccaatctggtgctctcgctgttggggctcggcatcccggagatggcgcagcttatcctgccgttaagtctgttccttggcctgctgatgaccctcggcaagctgtacaccgaaagtgaaattacggtgatgcacgcctgcggcctgagcaaagccgtgctgatcaaggcggcgatgatccttgcgctgttcactggcgcggtggcggcggtcaacgttatgtgggcggggccgtggtcgtcgcgccatcaggacgaggtgctggccgaagctaaagctaaccccggtatggcggcgctggcccagggccagttccagcaggccagcgatggtaacgcggtgatgtttatcgaaagcgtcaacggcaaccgcttccatgacgtcttccttgcccagctgcgtccgaaaggcaatgcgcgcccctcggtggtagtggcggattccggcgagctgtcgcagcagaaagacggctcgcaggtggtgaccctcaacaagggcacccgctttgaaggcaccgcgatgctgcgcgacttccgcattaccgacttcaataactatcaggctattatcggccaccaggcggtgagcgccgatccggacgacaccgaacagatggatatgcgcaccttgtggaaaacccacaccgaccgcgcgcgcgccgaactgcactggcgcttcacgctggtggcgaccgtcttcattatggcgctgatggtggtgccgctcagcgtggtgaacccgcgtcagggccgcgtgctgtcgatgctgccggcgatgctgctttacctggtgttcttcctgctgcaaacgtcgattaagtcgaacggcggcaaaggcaaaatggacccggctatctggatgtgggcgattaacctgctctattttgcgctggcggtgctgttaaacctgtgggacacggtgccgatgcgccgcttccgcgcccgttttaataaaggagcggcctgatgcaggcgtttggcgtacttgaccgttatatcggtaagacgattttcaacaccatcatgatgaccctgttcatgctggtgtcgctctccggcattatcaagtttgtcgatcagctgaaaaagtccgggcagggcagctacgatgcgctgggcgctggtctctacaccatcctcagcgtgccgaaggacatccagatcttcttcccaatggcggcgctgcttggcgcgctgctggggctggggatgctggcccagcgcagcgaactggtggtgatgcaggcatccggtttcacccggctgcaggtagcgctggcggtaatgaaaaccgcgatcccgctggtgctgctgaccatggccatcggcgagtgggtggcgccgcagggcgaacagatggcgcgcaactaccgtgcccagcagatgtacggcggctcgctgctctcaacccagcaggggctgtgggcgaaagatggccacaactttgtctatatcgaacgcgtaaaaggcaacgatgagctggggggcgtcagcatctatgccttcaacccggagcgtcgtttacagtcggtgcgctatgccgcttcggcaaaattcgatagcgaaaataaagtgtggcgtctgtcgcaggtggatgaatccgacctgaccgatccaaagcaggtgaccgggtcgcagatggtgagcggcacctggaaaaccaacctgacgccggacaaactgggcgtggttgccctggatccggatgcgctgtcgatcagcgggctgcacaactatgtgaaatacctcaagtccagcggccaggatccgggacgctaccagctcaatatgtggagcaaaatcttccagccgctgtcggtggcggtgatgatgctgatggcgctgtcgtttatctttggcccgctgcgtagcgtgccgatgggcgtgcgggtggtgacggggattagcttcggctttatcttctatgtcctcgaccagattttcggcccgctgaccctggtctacggcataccgccgatcatcggcgcgctgttgccgagcgccagcttcttcctgataagcctctggctgatgatgcgcaaggcctagcgggtaagcctgaaacgtaagccccctcagcgatgagggggcttttttttagcgcttgcgtccgcccagcaggctgcccagcatgccgcggacgatctgattggtgacctggcgaaccgcgcttttcgctgcggtctgcacgataccgtcgcgtttaccgccccgcgggccggtgctgccgaacaggatatctttcaggccgccaagcagcccgtcgtcatcgccgttctgctggcccttcgccggcggagccgactgctgcccggtggcgacctgcaccccttgctgcagcatttcgaaagccgactcgcggtccacctcctcctcatacttaccgtacagcggagagtggttcagcagaccattgcgctcgtcatcgctgaccggccccattcgcgaacagggggcgataaccatcgcccgctcgaccaccgacgggctgcctttctcatcgaggaaggagatcagcgcctcgccggtgcccagctcctggatcgcctgctcggtactgaaggccgggttggcgcgcatggtctgggcggcggttttcaccgccttctggtccttcggcgtaaaggcgcgcagggcatgctgcacgcggttgcccagctggccgagcacggcgtcgggaatatccgccgggttctgcgagacaaagtagacgccgacgcccttggagcggataaggcggatcacctgttcaattttatccagcagcacctgcggcgcgtcgttgaacagcagatgcgcctcatcgaagaagaacaccagcttcggtttatcgaggtcgccggcttccggcaggcgctcgtagagctcggagagcatccacagcaggctggcggcgtacagcttcggcatctggtagagcttttcggcgctaaggatattgatcacccctttaccgctggcatcgacgcgcatccagtcggcaatatccagcatcggctcgccgaagaagtgctcggcgccctgttgctccagggtcaacagcccgcgctggatggcgccgatcgaggcgctgttaatattgccgtactggttctggaaagacttggcgttatcgccgataaactgggtgatggcgcggaggtctttgaagtcgagcagcagcaggccgcggtcgtccgcgatgcggaaaataatgttcagtacgccgctctgcacctcgttgagattgagcaggcgcgccagcagcagggggccgagatcggaaaccgtcgcccgcaccgggtggcccttctcgccaaagatatcccagagcaccaccgggttggcatgcggctcccagtcgctgacgccgatcttctccagccgcgcctgcagtttctctgagctctgccccgcggcggcaatgccggtcaggtcgcccttgacgtcggccataaataccggcacgccaatctccgagaacgactcagccagcttctgcagggtgacggttttaccggtgccggtcgcaccggtgataagcccatggcggttggccatcgcgggcagtaaatagagcgcgttatccagcgtgcgcgcaatcaacaggggtgagctcatggtcgattcctccatttatcctgcgacgattataggcaacctcgtcgtccggcgttgggaaaatcgtcacgcgccgcgcacgctgtaccgtgagggtctcaggcgcagtggcgctggatgagcgcgatgctctgctcaatttcgcgctcgatatccgcttcgctccattgcgccagctcgggggcgaagggctcaaaagcgtacaccccctgatagccgcgggcttccagcgctttaacctgctcgcaggtgccgagacgatccttcggggttagcatgatgcgctcggcatcggtgagctgctcgcgcggacggctatcgtccactcctgaaaggtgcaccagcccgatatccgccacctccacctggctgaactcgtccgccgcctgcgggtaaagatggtgatggaaggtgtcgagcagcagcttaaacggcacgcgggcgtcgtggatcagcgtctgcgcctgatgtgcagaacgcagcgagctttgcgggaagcccagcggctccaccaggccgtggatgccatagaaggcgaacagcggcgccaggtcgcgcagggcgcccagggtttcgctggccggcacctcgctgccgtcgttgagcggacagagcaccagcgatttggcgccgatggcctgggcctctttcagcagcgattcggtcaactgccgcacctcttcgctacgacggttaaaggggtagaccgcgttaatcgtcaggatctcgatgtggtagcgcgccgccagctcgcgcacctgctgatggctcagatcgtcggtcacttttccactgggtaaatcgttgcgcagctcgaccttattcaggcccagacggttcaccagacggaaaaacgcttcaatgctgagcgctggcgcgattttgcggttaatacaaaaacgttgcattgcgatggccataggacactcctgacggaagaggggtaggttcgttcaattggctaacagtcaaaacgtttattccaaaattagcaagaatggaaatgatgaatgtttgagctgtctcgcaaaatatcaccggcaccgactaccggcgcgacagcggcgggaagcctggcgtcgagggcaacgaggcgcgatgcgggaagcgcacaggcgaccggttagcgcaaaatgcgactgttatcaccaaaatgaaatttcatttcacaacaatgttgaaatataaatttcattttactacggttatagcacagcagaatcagcgacgggccggtgtgcgctggcccccttcactatgaggcgagaacatgacgatcacaggaaactttattggcgggaaaaccgttatcagcagcagcaacgaaacgatgccggtgtatgacccggcgacgggcaaagcggtgcgcgaagtcacggtgtcaaccgcgcaggaagtctccgaggcgattcaggttgctcgcgatgcgtttgacagctggtcccgtaccacgccgctgcgccgcgcccgcgtgctgttcaacttcaaaatgttgctggagcagcacgtggaagagctggcggggatcatcgtcagcgagcacggtaaggtgtggtcggatgcgctgggcgagctgacccgcggtatggaagtggtcgaattcgcctgcgggatcccgcacctgattaaaggcgaatactcctctgacgtcggcaccggcgtcgacagctactcgttgatgcagcccctgggcgtggtggcagggatcaccccgttcaacttcccggcgatggtgccgatgtggatgttcccgctggcgctggcctgcggcaacagtttcgtcctcaagccgcccgcgctggcgccgacggccgctgtgcgtctggcagagctgttgaaagaggctggtctgccggacggcgtgtttaacgtcgtgcactgcagcaatgaagatgctgagcagctgtacactgatccgcgtattgcggcggtgagcttcgtcggctcctccggcgtggcggagtatatctataagaccgccagcgcccacggcaagcgagtgcaggccttcggcgccgccaaaaaccacgcgattgtgatgccggatgccgatctcgacgctaccgttaacgccattatgggcggcgcttttggctccgcaggcgagcgctgcatggcgctgccggtggtggtggcggtgggagatgaaaccgccgacaaactgatcgcccgcctgaagccgctggtggaagcgctgaaagtaggcccgggctgcatgcgcggccaggaagagaacgagatgggaccggtggtgtctgatacccaccagaaaaaagtgctcggctatattgataaaggcgaaagcgaaggggcaaaactggtggtcgatggccgcaaactgcgcgtgccgggttacgacgcgggctactatgtcggcggcacccttttcgatcacgtcaccccggagatgaccatctggcgcgaagagatctttggcccggtgctggggattgtgcgcgcggcggactatgacagcgcccttgagctggtcaacagccacgagtttggcaacggcagcgccgttttcaccagcaacggccacaccgcgcgtgaattcgtccacgacgtgcaggcggggatggtcggggtgaacgtgccggtcccggtgccgatggcgttccacagcttcggcggctggaagcgctcggtgtttggcgcgttgaacgtccatgggccggacggcgtgcgcttctacacgcgtatgaagaccgccaccgtacgctggccggcagggcagcagaccgtatctgaattcagcatgccgacgttaggttaatcggcgaaggagagcgccatgtcgttactggctaaatcgcgaaaagagggacagatccagcatattacgccgcaaagcgccggttggcgctatatcggctttgatgtctggatgttgaaaaaagggcagaccgtgacgctggagagcggcgatcgcgagctgtgcctggtgctggtcgccgggctggcgtcggtgaaaacgcaacatgccgatttcccgaatctcggtaaacggatgtcgccgtttgaacgcaccccgccgtggtcggtctacatcccgccgcaggataaagtcgaggtgactgccgattccgatctggagctggcggtatgcagcgcgccgggcaaaggcagcttcccggcacgcctcattcggccggaagacgtcggggtagagcaccgtgggaaagggcgcaaccagcgtcgggtgcataatattctgccggacagcgccgaggcggactgcctgctggtggtggaagtctacaccgacgagggggccaccagttcgtggccgtcgcataaacatgataccgcccagccgggcaaagagacgcagctggaagaaacctactatcaccgcttcgatccgccgcagggctttgccttccagcgggtctacaccgacgaccgcagcctggacgcctgtatggcgccctacaaccacgatgtggtgatggtgccgcgcggttaccatccggtggcagcgattgccggttacgatagctactatctgaacgtgatggccgggccggaccggaaatggctgttcacctgggaagatgaccacgcctggatcaacacgccggagtacccgcgccacgactgacgtgcggtgcagaagcggataaagaaggccggttagcgatgctaaccggccttcctgtttgagggcggcagatgttttttcgcgaaacgctccgcggaatcccactcccgacccggcaagcgcagcgccgccgggaaggaacctccggcgccatacccgcctttgtgccggatggcgctacgcttatccggcctacgggagcctcccataagctcctataccccaggcccggcaagcgcagcgccgccgggcaggacaccgcagacaccgtacccgtttttgtgccggatggcgctacgcttatccggcctacggcatcctcccgtaagctcctataccgtaggcccggcaagcgcagcgccgccgggcgatgaccgcaggcacggtgctgcttttatgccgggcggcggctcatgccttgcccggcatacggttcatgcgacctgccgttaatttattcaccattgttgctgaaactgccggtgctgacggcctcaaaatcgctgagacgttcccggaaggccggggcagcccgcatggatgcgggctgagggccgtgttttgcacggacgctgcctcggcccgacccgaagcctgcagggataagtcgaagggaccgcgtagcggcgattttgctggccggagcccgggggtacagggggcggcggcgactggccgccccctgtgcgctccctgcgccatgccaggcataacgcagacgattaaccgggagcgcaatgtgcgctgaaatcacatgcgacaaacgctttacccggattaatagagttgcataccaataacattatatccggcaccccgcaggcccatataccccaggcccggcaagcgcagcgccgccgggcaggacacctccggcgccatacctgcctttgtgccggatggcggcttcgccttatccggcctacgggagcctcccgtaagctcctataccgtaggcccggcaagcgcagcgccgccgggcgatgaccacaggcacggtgctgcttttatgccgggcggcggctcacgccttgcccggcatacggttcgtgcgacctgccgttaatttattcaccattgttgctgaaactgccggtgctgacggcctcaaaatcgctgagacgttcccggaaggccggggcagcccgcatggatgcgggctgagggccgtgttttgcacggacgctgcctcggcccgacccgaagcctgcagggataagtcgaagggaccgcgtagcggcgattttgctggccggagcccgggggtacagggggcggcggcgactggccgccccctgtgcgctccctgcgccatgccaggcataacgtagacgattaaccgggagcgcaatgtgcgctgaaatcacatgcgacaaacgcttttcccggattaatagagttgcataccaataacattatctccggcaccccgcaggcccatataccccaggcccggcaagcgcagcgccgccggggaggacatccccggggccatacccacctttgtgccggatggcgctacgcttatccggcctacgggatcctcccgtaaggtcctataccccaggcccggcaagcgcagcgccgccgggcagggcacctccggcgccatacccgcctttgtgccggatggcggcttcgccttatccggcctacgggaggatcccgtaagcccctataccgtcggcccggcaagcgcagcgccgccgggcaggacaccgcagacaccgtacccgtttttgtgccggatggcgctacgcttatccggcctacgggatcctcccgtaagctcctataccgtaggcccggcaagcgcagcgccgccgggcgatgaccacaggcacggcgctgcttttatgccgggcggcggctcacgccttgcccggcatacggttcatgcgacctgccgttaatttattcaccattgttgctgaaactgccggtgctgacggcctcaaaatcgctgagacgttcccggaaggccggggcagcccgcatggatgcgggctgagggccgtgttttgcacggacgctgcctcggcccgacccgaagcctgcagggataagtcgaagggaccgcgtagcggcgattttgctggccggagcccgggggtacagggggcggcggcgactggccgccccctgtgcgctccctgcgccatgccaggcataacgcagaagattaaccgggagcgcaatgtgcgctgaaatcacatgcgacaaacgctttacccggattaatagagttgcataccaataacattatctccggcaccccgcaggcacatataccccaggcccggcaagcgcagcgccgccggggagggcaccaccggtgccatactcgcctttgtgccggatggcggcttcgccttatccggcctacgggatcctcccgtaagtccctatacaccaggcccggcaagcgcagcgccgccgggcaggacacctccggcgccatacctgcctttgtgccggatggcggcttcgccttatccggcctacggcatccttccgtaagcctatactgcgccgccgagtaacaaacgccaggcagcctatctcacgccttctgcttggcctcggactcctggctgctgttcagcgccagcgagaccgccagcgtctgggccagacacagggaagcaacctgcgaacggaagccatccacctgcgcttcacgcaccacaaagcagacatcgctgaaggccgccagcgggctgacctggctgtcggtaatggcgatctgccgcgctttgcgctgcgcgcccagctccaccagctcgaccacttcccgcgcgtacggcgagaagctcaccgccactaccacgtctttcggaccgaccaggctcagctgctcggtgaacatgccgccgaggccgtcgatcagaaaggctttgcgatcgaggtgacgcagcgcataggtcagataggaggcgacgctaaacgaccggcgcagaccaatgacgtaaatattttccgcctcgcccagcagggccaccgcgcgctccagatcatcgctggaggtctgcatcgccagctgctgcaacgcctggttgttcaccatcgtgaacatattgaggatttccgtcggcgtttccggcgggctggactcatcgctggtggtctggcggaacagacgggcgcgctcggtatagttggcggtctcttccatcaaatgttgcttgaacatctgtttcatttcgttaaagccgctgaagccgaaggcgttggcaaaacgaatcaacgtggaagggggaacatccgcctgttgcgcaatggaggccacggtatcgaaagccacgctattgctgttatcaaggatatagcgggcgacctgtttcaggcgtttgcttaacgtatcgtagcgacgcctgatttcatcctgcaggatggtcagctgtgttgggttattggccatagagtgcgctctgagaaaatggaaggaatatggcttccagtgtaccaaatgaagcgaatttttcatttattgcgacgaaatacgcgattcatttcacgaagaaacagaaaaacgcccgctccgcaaggtgacggagacgggcgtcgggggatcagcggcgggcttcgcgccagtagccaatgagcgtcaggtagttgcgtttcacttcctctatcagggcctcatcgctgagctcaccctgcatccagcgccgcgacggctggccaaagatggtgcgcccgacggcgaaacctttgatcatcgggtgtgcggccgcctcggcgaaaccggcgcgcagtttgtcggaaggggcgtcaagcccgaggatcaggatcccgcggctccacggatcttcgcgctcgataagggcggtgatctgctgccagctggcgctggagagcggcggcagcttccaccagtccggtttgatccccagctgataaaagtgttccagcatagtgtggtaatggcgctcgtctttgtccgggccattttccggcaggatcacctccagcagcagttcatggcctgacttgttacaggcctgccagacctcgagcagcagggcgtcctgctctgcacgcagcgccgccgggtcgtccgggtgatagaagaccaggcatttgacgacatgctccagcggccagtcgatcagctgcgagccgatgttgccatgctccagacgcagcggtcgcgagctgggcagttcgatagggcgcccgatccaccagcccttgccggtaatggcgttgagcgcacgctggccgtaggtgccgtcggccagaatgccgctgcgctgatcgagacctgcctcctgcgccgccgcttcggccgcggccaacaacagcagtttgagctgcggaatgcaggcttcgtcgcgcccggtctcccgcgccaggtcggccagctgtttgcgatggtcgaaggcgaaaatgcacagctccggccactgttgacggcggctggtgacccggtgcaggtggttgaggcgctcgtcgacgtccgggcgcggcaccgattcggcgcgctgcaggtagtcatcaagttcgactttggtcggcatcgccggcgcgcagccgtggcgggagaccaccagcgccccgcaggcgttggcgtaacggcaagcctgctcccagccttcgtcgttgagccagccgcgcagcagacccgacataaaggcatccccggcgcccagcacgttgagaacctccacgcgcacgccctgctgtagcggcacctggtcccagctgtccgggatgtcgccttccagcaccacgcagcccatcggcccgcgcttgcagacgagagtggctttggtggcattgcgcacatttttcagcgcggtcagggtatcggtgctgcccccggcaatatgaaactcttcttcggttcccaccaccaaatcgaacagatgcagcacttcctgcagctggctggtgaccggtccggactcaatgaaacgggtttcgccatcgccgagcgaggtgagcccccacagcaccggacggtaatcgatatccagagcggtacgcaggccgtgacggcgggcgtactccagcgccttcagcaccgcggcgcgggtgttggcgtgcgacaggtgggtgccagtcaccgccagcgcccgggaggaggcaatatactcctcgctaatgtcgtcaggcgttaaggccatatcggcgcagttatcgcggtagaaaatcagggggaaggtctcctgatccttaatccccagcatcaccagcgcggtcaggcgagatttgtcggtaatcagatactcggtatccaccccggcgcggttgagcgtttcgcgcaggaaacggccgttgtgttcatcgccaacgcgcgccagcatggccgatttcagcccctgaatcgcggtgccaaaggccacgttgccggaggagccgcccagatatttcgcgaaactggcaacgtcttctagccgcgaaccaatctgctgggcatagaggtcgacggccacccgacctatacagatgacgtcgagccgctttactgctgcattcatagctaggatttcctttttggtgtctgctgcctggaagggtcgggatcccgacgtcgactccgtgaacagcctgagggttattggttacccttagtttgagaaataaatatttcatttgcaaactcgttcgaaattaaaaaaccaaaagtgtgagggatctaccactctgccgcactgagcctcgcgcgagcgcggatcgccccctctgtcgacccgggggaaaatgaaacgccaaatggcatccatttacctatgatttttaaggggatattgccgtctggtgcggcaaaaaagggcccgaaaacgtgtctggaatgtaagtgaaacgtatgaaatgggtagagagtttgatccttctcgcaaaatgaaatatttcttctgtatttgtatttaatgaaaaaaatgtttgcctataatccacaggtattccagtgacgtgaacgacggccccggcggcatcggcgcgacgccacacacaaatactgaacaataaggattgtgcatcatgggcaaactgagactgacaacggcgcaggcgctggtgaagttcctcgataaccagtacctggaagtggatggcgtagagctgaagttcgtgaaaggcattttcgcgattttcggccatggcaacgtcctggggctggggcaggcgctggagcaggacagcggcgatatgcgcgtctatcaggggcgcaacgagcaggggatggcccacgcggccaccggttttgcccgccaggccctgcgccggcagattatcgcctgcacctcctccatcggtccaggggcggccaacatgatcaccgccgccggcaccgccagcgccaaccgcattccgctgctgctgctgccgggcgatgtcttcgccacccgccagccggatccggtgctccagcagattgaacagagctacgatctcagcatcagcaccaatgacgccttccgcgcagtcagcaaatactgggaccgcattacccgcccggaacagctgatgagcgcctgcatcaacgccatgcgcgtcctgaccgacccggcggaaaccggcgcggtgacgctgtgcctgccgcaggatgtgcagggcgaagcctgggattacccggaatccttctttgcgcgccgcgtgcaccgtctcgaccggcgcccggccagcgccgcgcagctggcggacgccgtggcggccatcaaagccagccgtaaaccgctgatcgtctgcggcggcggggtgaaatactccggcgcgggcgaagcgctgtcccgtttcgccgagcgctacggggtgcccttcgccgaaacccaggccgggaaggggacggtggtctcgtctcaccccctgaacgtcggcggcgtcggcgagacgggctgcctggcggcgaacctgctggcgaaagaggccgacctggtgatcggcgtcggcacccgcttcagcgattttaccaccgcctcgaaatggattttccagcacccggaggtgcgtttcctgaatattaacgtcagcaacttcgacgcctggaagctggacggcattgccatgctggcggacgcccgggaagcgatgaccgctctcgacgcggcgctggcggacagcggctggcaggccggctggggcgcgcagatcgagagcgtgcagagccgtcagttaaaagagacccagcgcgtctaccaggcggtgtggcaggagaaatcctttgtgccggagatcgacgatcatctcgatcgtgaatcggtgtatcgcgagttccgccagatcaccgactccaccctgacccagagcagcgtccttggggtactgaatgaaacgctgccggccgaggcggtgatcgtcgcggcggcgggcagcctgccaggcgatctgcagcgcgtctggcgcaaccgcgcggaaaacacctaccacgtggagtacggctactcctgcatgggatatgaagtcaacgccgcgctgggcgtgaagctggcgcagccgcagagcgaagtctactccctggtcggcgatggctcgttcatgatgctgcactctgagctggtcacctccctgcaggagcgggcgaagatcaacgtcgtgctgttcgacaacatggccaacggctgcatcaacaacctgcagatggagcacgggatggacagcttcggcaccgagttccgctaccgtcagccggaaaccggccagctgcagggcggcctggtgccggtggacttcgccaccatcgccgccggctacggctgcaaaacctggcgcgtcacaaccctggacgaactgcgccacgcgctggacgccgcccgtcgcgaaacggtcagcactctgattgatattaaagtgctgccgaagaccatggtgcacaaatacggcagctggtggaacgttggggtcgcccagacggcgctctctgaacggatccgcaaggtggcgcaaatgattaatgaaaagcgcgcccaggcgcgtgattactaaaacgaacatccactctgaatcctacagacttacggagaaaaccattatgtcgctcaaattaggtgtcatcggcgctggcgctatcggtaaagaacacatccgtcgctgcacccaggttctgcagggcgccaccgttgtggcggtgtctgatatcaatgccgacaacgcccgcgcggcggtcgcgctgccgggcgtgcaggcggaagtctacgccgacggtcacgacgtgattaacgccagcgatgtcgatgccatcctggtcacctcctgggacccgacccacgaagagtacaccctggccgccatcgccgccggtaagccggtattctgcgaaaaaccgctggcgatgtctgcggaaggctgccgccgcatcgtcgatgccgaaatgaaggccggccgtcgtctggtgcaggttggctttatgcgcccgtacgacgaaggctatctggcgctgaaaaaagtgatcgacgatggcgatatcggcgcaccgctgatgctgcgctgcgcccaccgcaaccagtcggtcggcgagaactacaccaccgatatggcgatcaccaacaccctgatccacgagctggacgtgctgcgctggctgctgaacgatgactaccgttccgtgcaggtgcgcttcccgcgctccacctcgcacacccatgcgcgcctgaaagatccgcagatcgtctcctttgaaaccaaaaaaggcactctgatcgacgtcgaagtgttcgtgaactgccagtacgggtatgacatccagtgcgaagtggtcggcgaaaccgggattgcccgtctgccggagccgtctgccgtccagatgcgcaagtccgccagcctgtcgaccgccattctcaccgactggaaagaccgctttatcaaagcctacgacgtcgagctgcaggcctttatcaacgacgtcaaagccggccagctgcacggcccgtcggcctgggacggctacgcggcgtcggtggcggcggacgcctgcattaaagcgcagggaaccagcgagccggttgaggtgacgctgcctgagtgcccggcattctacaaacgttaagcgcgttttgctgacggaacttctttgcacaggtaacgacgatgaaaattgcctttgatgtggatgtcattaaggacctcgggatcacccgcatggtccatcaggtagcggagtggggctacaagtacattgaacagtcgccgcacccgcagattaacccgttctacaagcacccgcgcgccagccgggagatcatggcggagtacaagcaggcgctgcgcgataccggccttgagctgtcgtcgtttatctgcgtctaccgctggtccggtccggacgaactgcgccgtcaggcggcggtgaaaaactggaaacggctggtggaaattgcggtagagatgggcgttcaggtgatcaacaccgagttctccggcgatccgaatcagcctgagatctgcgatgaaatgttctatcgctcaatggaagagctgttgccgatttttgagcgggaaggcatccgcgtggagatccaggcgcatccctgggatttctgcgaagagaacaatgaaaccgtcgatatcgtgaagtcgttccgcagcgataacgtgaagtacgtctacagcgtgccgcacacctttttctacgacaaaggcgtcggcgacgtggcgagcatgctgcgctatgccgggagcgatctctcccatgtcctgattgcggatacccgcaaccatacgaaacattgccgctatatcgttaacccgccgggcgtggatgccgtggtgcaccagcacgtaggcgtcggggaaggggatgtggatttcgacgcgctgttccgcaccctgcgcgaaatgaaattcgccgagcagaccttcaaggtcggcggggagccgattgtcgccacctcgctgtttggctacccggaaaaaatgaaataccaggcagtggaaacccgtgaacttattgaacgtgaattgctgcgccgctaaggcgcagcggcaggagccctactatgaacaaagataacgtcaaactggctatcgccccaatcggctggactaacgatgatatgccggagctcggcagcgaaaacaccttccagcagatcgtcagcgaaatggcgctggccggctttaccggcagcgaagtcggcagcaaatatccgcgcgacccggcggttctcaagccgatgctggatatccgcggcattcagatctgcaacgcctggttcagcacctttttcgccaacggccagcgggaaaaaaccattgatgaattcgtcaatcacatgaacttccttcatgcgatgggcgcgaaagtgattggctgctccgagcagagcggcagcatccaggggctggataaaccgatcctcggcgatgcgaagccgtgcttcagcgacgaagagtggcagcgggtggcggaaggctacaacaccctcggccgcctggcggcggagaagggaatgcaggtctgtctgcatcaccacatgggcaccggcattcagaccaccgcggaaatcgacaaatttatgtcgctggtggacgagcgcgtcttcctgctgttcgacaccggccacgcctggtattccgaaggcggcgaagcgccgatgctggcgatcctcaaaaagtatctgccgcgcatcaaccacgtccacctgaaagacgtccgcccgccggtgatcgaccaggtgcgccgcgacggcctgtcgttcctcgacggcgtgaaaaaaggcaccttcaccgtcccgggcgacggggtgatcgatttccgtccggtgttcaagctgctggacgactttggctataaaggctggatggtagtggaagccgagcaggatcctgctctggccaatcctttcgaatacgccgtcaaagcgcgcaaatatattcgcgaaacggcagggatctaatcgttgtgacattttcaggccataccgggtatggcctgcttttttcctttctcaaccggacccagggcttaaccacagcgccggacagttccctctccctcagggagagggccggggtgaggatgacgatgacgggtaaagcgtcacttcacttccgccagcgcggtcttgtccacatacggtttcatcagcgcgtcggcttccttctgcgccgcctgcaccgccgcttccggcgtcactttggcatcattgaccaccgccgccagctggttctccatcgccttacgcaccgccacggtctcccaggtggagtaccatggatgggcgtacttcagctgctcaagggcgatcgccgcccgcggatcctgctgcagataggccttcatctccggcgtatcgtatgacgccttgcgcggcgagaagtagccggtgaagcggctccacgcgccgttcacctcggggctcaccagataggtcaggaactgatacgccgctttcttctgcgcctcgttgatgcctttaaagctcaccaggctggcgccgccgatcggcaccgcacgctgctctttggccggcagcatcgctaccccaagctcaaagtctttgctgttctcgcgcataaagcccagcgcgccggtgctgagcatcgccatcccgagcttgccggagaagaacgcggcgctgatctgcttcgagttcaagaccccggacggcatcaccttgtccttgtagatcagatcctgccagaagcgcagggcgccgatggcggtcggcgagttgtaatagacctcgcccggatagtcttcgttaaagtatttcccgccgttggcgcgcaccagtgccgagaagatccagccgccgtagtcgtcgttggtcgacggcagcatgatcccccactggcctttgctctcgtcggtcagctttttggcatcagccagcagctcggcccaggtctggggcggctgtttgatcccggcttgatcgaacatcgtcttgttgtagtagaggatcggcgtcgagttatggaacgggatcgcataggtggtgcccatcacctgggcgttcttatgcatcgcgggccagaattccttttgcagaaaatcgccggccttttgatcgccatatttaaacagctcgtccatcggcaggatctcatctttcagcgccagatcggtggtgaagttggcggacatgatcaccagcgccggcggctggccggccttctgcgccgattcggctttgatcttggtggtgtcgtagttgccggtgaagatcccgcgcacttcgacatcctgctgcgagtcgttgaattgcttaatgacgcgggtcatctccatggtcagcttgccgtccaccggcgccgggaacatgaagtctattttctcttttgccagcgccgcgccgctcagggcaaggctgaggccaaccgcgactagcgtaaaaggtttaaacatgattacactccatcaataaattatgctgggtctcagcatgaaaaagatgcacatcggcaggcgagaagccgatctgtagcgactcgcctttctccggcaccgtgccgcggtggcggcggctaaagcgcagggtgccgatcggggtgctgacgtggagcaggtaatcggcccccatcagttctcgttgcagaacggtggccggcaggcgcagatggccctcctccacgcggtcggtaatatgttccgggcgaacgcccagccagacgcgggtctgatcccggtggcgcggcggcagcggatggcgttgttcgccaagctgaacgttgccgtcaacgcaggggagcgatagcagattcattgccggtgaaccgataaatccggccacgaacagattggccgggttggcatacagatattctggccgtcctacctgctgcacgtggccgccgttcatcaccacgatgcggtcggccatcgacatcgcctcggtctgatcgtgggtcacatagatggtgctggttttcagctgctggtggagcgccataatgctgtcgcgcacttcgctgcgcaggcgggcgtcgaggttggagagcggctcgtccatcaggaacagccgcggattgcgcacaatcgcccgggccatcgccacccgctggcgctggccgccggagagcttcgccggtttgcggtcgagcagcgcctccagctgcagcatctgcgccactttgtccacccgcggctgccagctgcttttctcttccttgcgcaccttcatgccgaaggtgatgttgtcgcgcaccgacagatgggggaacagggcatagttctggaagatcatcgcgaagttgcgctcgcgcggcgtggtggcggtgatgttctcatcatgcagccagatttgtccttcgctgaccggctccagcccggcgagcaggcgcagcagggtgcttttcccgcagcccgacgggccgaccagcaccacgaattcgccttcgtgaatatccagcgacagggcgctgagcgccggtttgccgtcgaaacgtttactgatgttttgcagactgagcatggcggttagcgctcttccgttgggcaactgatgttttcgtcgtacagccacggcccggcgtagtgggccagcgagtgctggtagctcacccactgctcaccgacctgacggtgcatcaggcacgaggccggggagaggtcgtaatagggccgggtgtcttcgtggcagtacggcacctgatggacggtgccgggaatggtggagatcagcgcctggcgatactgggtcatggtcaggctgtggttgtggccgcagaagatgcgcgtcagcgacggaaaacgctccaccagcgccagcagacggtggccgttttcgcaggcgatcgggtccatctgcgcattgcccagcggcagcggcgggtggtgcataaagatcgttgccggtttgtcgccgccctcgaacagttgcgcctccagccagctgatggtctcgtcggtcagccagccttttgacgtgccggcatgactggagtcgataaacagcaggcgggtggcgaagtcatccaccgcatagcgcatattttgcggatcgttgcccagctgcgggcacagcggatgaagatgctcgagaaaatgggctttgtcgtcgtggttgccggggatcagatacagcggatagttcaggctgccgaggatctggcgggccacctgatactcctccgggcggccgcagttgacgatatccccgctcaccaccaccgcgtccgggcgctcgcgcagcgcgttaagctgggagaccacgtcggcgttggcggcattgacgtcgataaagccgtacagcttctcgccgcggctgcggaaatgggtatcggaaatgtgcgctaacagcatgaatcactccttatttgatcccggagaagccgaagctccgcaggaactgtttctgaaaaaggatgaacgccagcatcagcggcaggcagaccatcagcgtcccggcgccgatggtgccccactggccgccggattcggcgcccatggcgaaagagaccagcccgacggtcagcacctgcttatcgggatcgttgagcatcatcagcggccacaggtactcgttccagtggtaggtaatgctgacggtggcgaaggccagcaccgacggccaggacatcggcagcagtacgcggaacagcacctgccaccagcggcagccctccatcagcgccgcctcctccagctctttcggaatggcgaggaacgcctgacgcatcaggaacacgccgaacgccgaggtgaagtagggcatcatcaccccggtgagggtgttgagcaggccgaaggttttcagggtcagcatgttcggcaccatcatcaccaccggcatgatcatcagctgcaccaggaacaggagaaacagcgtctgcttgccgcgaaactcgtggcaggcgaagacgtagccggcggtggtgatggtcaacagctgcacgaagaaggtgccgaaggtgaagataagggtgttggcgtacaggctcagccagtcggcgctgttccaggcgtcgcggaagttatcgagagtcagcggcaggcggggcagcagcgacgccatatcgtcgccgaaggtggtggcgctgaacgaggtcgccagcatccagataaacgggctgacccacagcagcgccaggcagcacattaatactgtgagcgtaaagggcgacgagcggcgcaggcgcagccacagcggacgggcggcggcgggcgtgcggaccagcagcggcgagatttcagcgctcatagtgggctcctttctccagcagtttcaggttaatcagcgagaaggcgaacagcccggccagggtgaggaaggtggcggcggaggctttaccgaggtcgtgggtatcccaggcgagattctggatgtaatagagcagcacggtggtggcgttgtccggcccgccgcgggtcatcaccgccacgtggtctatctgggtgatggagtagatcagcgcggtggtgatcacaaagctcagggtcgggcgcagcagcggtagcgtgaccttaaaaaagacctgcgtgcgggtagccccctccatcagcgccgcttcccgcgtcgaggccggaatgctctgcagcccggcgaggaaaaacagcatgtagtagccggcgaacttccacacgccgatcagcgccagggccagcagcgcgctgttgctgcgtcccagccagttgttgttcatcggcccgaacagcttcgccagatagtggtcgagcaggccgaggccgggcataaagataaacagccacagcgcggcggcgctgaccatcgggataatcatcgggaagaaaaaggcggtgcgcagccagcggttgacgcgatggttctcgctcagcgccaccgccagcagcagggcgagggtcaccccgggcactaccgtcagcaggatatagagcagattattgaccagcgactgccagaaaacgccgtcggcaaacaggcgggagaagttatccagcccgacgtactgcgcgccgtcgctggccatgcgggtatcaaacaggctgtcatacaccgaacgccccagcgggaaccaggtaaacagcagtaaaaacagcagggaaggcgacaggatcagccagggaagccaggtctttctcatggtgacgcgcatctcgttcagccatttatcgaagcccggattgtgggaagcaatgactacagaggcatggcggggagatgacggtttgatgaagcaacggggaaaacgccgggcgagcgggccgcccggcgggagagaatcatcagaagtcggctttcagcaccgcgcggtagcgggctttgccttcgcgaacgtgcttcagcgcttcgttaatttgcgacatcgggaacagctcggtggtcggagccactttgctgcgcccggcaaacttcatcagcgtgcgcagttcggacggattaccggtcgccgagccggagatgctgcggtcgccgccgatcagggtaaaggccggcaccgggaacggcttcatcaccgcgccgacggtatggaagttgccgccgtaagccagggcttcgaagtacggctgccagtcgaggtccaccgccacggtgttgatgatcaggtcgaactgaccggccagcgcttttaaggcttccggatcgcggctgttgaccacgcgatcggcgcccatcgccagcacttcctgctctttggccgggttggagctgaaggcggtcacttccgcgcccatcgcccgcagcagcttaatggcgatatggccgaggccgccgatgccgatcaccccgacgcggctggtggcggtgacgtggtgggtcagcagcggtttaaagacggtgatgccgccgcacagcatcgggccggcggacgccagatcgatgctctccggcagggggatcacccactgccagtcggcgcgcagcttattggcgaagccgccgcggttgagaatggtcggcaccgagccttccagacagttgatctggttgccgctgatgcaggcgtcgcaatggccgcagctgcgcgccgtccagccgatgccgaccttctggccaatcttcagccctttatcctgcgccgcgctgcccagcgccgccacccggccaatcacctcgtgaccggccaccagcgggtagctcgacatcccccattcgttgtcgatcatcgacaggtctgaatggcagatcccgcagtattccacttcaacttcgacatcttccggctgtagctcgccggcatcgtattcccacagcgacagatcggcgcccgcttctttggcggcgtagcttttaatgatggtcatgttcatttccttggggttggcgtgataacccagaaagtgtagagcatggtattcccaggcgcttggcaatcggaggggtcgcgaagcgggcggaccagccgcccgttaaggtcagcggctggccagcggccactgattaaggcggatgccgcgctgcggggcgttctcggcaaaatcatccagcaccgcccgcacgtccgggtcgagatagccgacgctgtcgtgctcgacgatcaccacgctcttttccggaatcttcgccagcagggccagcagatgcggattgtgcataaaggtcagattctgctggatgcgcagcacgtagtggtcatcgtagcgcgccagctgcagcgagtggcgatggctgcgccagagactgaatgccatctgggtggcaagaccaatcccgatccccgccagcatgccgcaggcgataatcccgccgatggtggcgaggaacgggacgtactgcgccgccccctggcggaactgctcgatgaacagccgcggggtcgccagcttatagccggtatagagcagcacggcggcgaggctggcgagcgggattaaggttagcaggccgctgaaccacaggccgcagatcagcagcagcacgccgtggataaagatcgacagtttgctctgcgcgccattgctgacgttcaccgagctgcggacgatcaccgcggtgatcggcatcgcccccagcacgccggagagcagattgcccacgccctgggcgaccatttcacggttcggcgaaggcggcggattttgcgggcgcagctttttcagcgcctcctggctgagcagggtttcgaggctggcgaccagcgccagggtcaccgccaccacccacaccgacggattgcgccacgcgctccatgcgggagactccagctcgcccagcaggtcgccgaggctgccgaacgccggcagggtaatacgcggtagggcggccagctgctgcggcgcaaaatgggtcagcagcagggtggtcacgcagccgagcaggacggcgatcagcggcccggggatccagcgcaggctcttcacccggcgaataagcggcgagccccacagccagagcaccagcagaccgcccgcggcgacggcgatagcactgagggagaaggtggcgttacccttcacgatatcaacgagcccggtctcttctgcgctgccgagcgcgacggggatctgctgaataatcagcaggatgccgatcgccgccagcatgcctttgatgacgctggcgggaaccagcgagataaagcgcccggcccgcaggatgccgaacagcagctgcagcacgccggccagcgccagcgccatcaggaagagggagaaggaacccagggattcaatagcggcgacgacgatggtgaccagtccggcggcggggccgctgacggcgaagcgggaggggctgagggcagtgacgaccaggccgccgatgatgccggtcagcaggccgacgaagggcggtaagccgctggcctgggcgatgccgaggcacagcggcagggcgacaaggaagacgacgatgccggcgagagagtcctgacgaagcgtgttcatggggcgtgctcctgcggtgagaggtgttcgacgagggtggttaaatggccggaagccagatcgtagacgcagccgtgcaggctgagcggtcgcccgctggcgagcaccgtctgcaccggttcactctccagcagaggggcgaactgggcgcgaacgttggcttccaccagggcgtccagcgcatggcgagagcgctccgcgttggcgctggcgctggtgctggcgccgggggaggccgcaacacaacagtcatcggcgatctgcgcaatttcgtgatgcagggtgtggcgcagctggccgatgcggcgagccagcgccgaggattcctgcgccagcggcagagtgggcagggagagcgccgcctgcaccccgccgcagccgtagtggccgcagagcaccacccgctccacctcaaggtagtcgagggcatactgcaggacgctcatgacgttgtcgtcggcgggatcgagcatgttggcgatattgcggtggacaaagagctcgccgggctggctgccggtgagcacctcggcgggcacgcggctgtcggagcagccgatccacagcgagtggggccgctgcccgtcgacccatttttcgaaatagtccggatcatgctgacacttctgcagcgcccagctgcggttgcgggccagcaaaggttttaacgtcgtcacaagtattctcctgagttaattcatcgagtgaatatgtccatcaagactcgtacagcgactagtaaaaatagtgtttaccggaacccttcacgcctgaggaaaatcctggattaaacggcaaaaagaaaacttttcattaatgtaaagttataaaaatattgatgaaattaatatttgactgcggagtgggtgagtaataaaaaggcattgattaaaactttctggaatatatgggaatgcgggtgggtggggtggggggaatagttggggagtggatattggggatgggtgggttgagtgattcgggtgagaatggtgtgagaaaaaatagagatgactttgagtgaagtttggggggcaaggggaaaggggagtggctggcaggtggtgctggggttgtgggggttgtgagaggagggttgctgatggcagtcgcgccccggaacggcggtaaaagctgacgccgcgcaggatagcgctgtttttttcaacacttagcgcaatgacgacacgctgtcgcttgcatgaccgccgccgacaggtataatccagaacgtttccgcatccccttcagtgccgaagtggcgaaatcggtagacgcagttgattcaaaatcaaccgtagaaatacgtgccggttcgagtccggccttcggcaccattagtacttccaagaccatccgagaaagtccaattatcccttaaaaatcaatgcttgcagcgatttttacgtcctgagtcgtccgaggttgtccgttgaaatccggatgtcattgggggcataattgggggcatcttaacttcgattagaaatgtgcccccaaaatgaagctcaacgccaggcaggtagagaccgcaaagcccaaagacaaaacctacaaaatggctgatggcggcggtttgtatctcgaagtttcggctaaggggtctaaatactggcgcatgaaatacagacgcccctctgacaaaaaagaggatcgccttgcttttggtgtttggccaactgtgacgcttgctcaggcaagaaccaagcgcgacgaagctaaaaagctgttagtacagggcattgacccaaaagccgaacagaaagaagctcaggccgagaattcgggggcatatactttcgaaacaattgctcgcgaatggcatgccagtaacaagcgatggagtgaagaccatcgatcgcgcgttcttcgctatcttgagctttatatcttccctcatatcggttcgtccgacattcgccagctcaaaaccagccacctgttagccccgattaaaaaagttgatgccagtggcaaacatgacgtcgcgcagcgtcttcagcagcgtgtaacggccattatgcgctatgccgttcagaacgattacatagactcaaacccggccagtgatatggctggtgctttatcaacaaccaaagcaagacactatccagctttaccctctagccgtttccctgaatttcttgctcgtctggcggcatatcgtggtcgtgtaatgacacggatcgccgtagagctttcattgctcacttttgtacgttccagtgaactccgttttgcacgttgggatgaattcgattttgctaaatctctttggcgtatacctgcaaagcgtgaagaaattaaaggcgtacgttactcctaccgcggcatgaagatgaaagaggaacatatagttccgcttagtcgacaagctatagtgttgttagagcagcttaagcaaatcagtggtgataaagagctactttttccgggagatcacgacgcaacgaaggtcatgagtgaaaacacagtaaacggtgcgttgcgtgctatgggctatgatacgaaaacagaggtctgtgggcatggattcaggacgatggcgcgcggcgcgctgggggaatcgggtttatggagtgatgatgctatagaacgccaactgagtcattcagagcgtaataatgtacgtgcagcatatattcacacttctgaacatttagatgaacgccgtttaatggtgcaatggtgggctgattatctcaaatcaaatgaaggcaaaatagtcacaccttatgaatttgccaaaataagaaaaagctgatagcagaaataaacgcctctacaaaaagaaggcgtttatttatattaaaatattgaatcataatcttccagtagcaactttttttcgtacttcctctttccaattaccactgtggattattctatcaaaattacttcctgctcttcctgataacaaatcaattcgagatagtttgctgatttcatcccagtcgtcatagagaatatatatcgcattgccatattctatgttctcaaaaacaaccagatcgtcctctagcatagctccaatgtaattactgaacgtactatttccagtaacaatttttttaggttcaaggctcatgaagaactcatatctattttcagcaacggctttcttatcgtcagttatgttttttcctttgaaaattcttgctaaaatttcttctttgctacctggcggaaatatgtcccatgagactataagtgtatcagcataagtagatataggtttatcagcattctcaacgccacatttaccgagattttcttgaagaagatttagatcaaatagcaactcatcatcaaacttatttgaatttttttctaaaattctagttgctctgaaattaaatataaaatagctgtccgaggacttcttgtgattaatttcaattgctataagttttggtgggattatgtctctggggtatttatcgtgaggtaatctaacagtatgtgtaccgttagagctatccccccagttagggaaagtgcgaataagcaggtcatttcttcccaagctgactcgttgattaaaatttcgcggatctgggccgatttttttcccgcaaacacatcgaatcagcctatttaggctattttttccaccatttctggcgttatttccggtttttactgagatctctcccactgacgtatcatttggtccacccgaaacaggttggccagggtgaataacatcgccagttggttatcgtttttcagcagccccttgtatctggctttcacgaagccgaactgccgcttgatgatgcgaaacgggtgctccaccctggcacggatgctggctttcatgtattcgatgttgatggccgttttgttcttgcgcggatgctgcttcaaggtttttaccttgccgggacgctcggcgatcagccagtccacatccacctcggccagctcctcgcgctgtggcgctccttggtagccggcatcggctgagacaaattgctcctctccatgcagcagattacccagctgattgaggtcatgctcgttggccgcggtggtgaccaggctgtgggtcaggccactcttggcatcgacaccaatgtgggccttcatgccaaagtgccactgattgcctttcttggtctgatgcatctccggatcgcgttgctgctctttgttcttggtagagctgggtgcctcaatgatggtggcatccaccaaagtgccttgggtcatcatgacgcctgcttcggccagccagcgattgatggtcttgaacaattgacgggccagttgatgctgctcgagcaggtggcggaaattcatgatggtggtgcgatccggcagggcgctatccagggataatcgggcaaacaggcgcatggaggcgatttcgtacagggcatcttccatggcaccgtcgctcaggttgtaccaatgctgcatgcagtgaatacgcagcatggtctccagcggatagggccgtcggccattgcccgccttgggataaaacggctcgatgacagcggtcatattctgccatggcagaatctgctccatgcgggagaggaaaatctcttttcgggtctgacggcgcttagtgctgaattcactatcggcgaaggtgagttgatggctcatgatgtccctctgggatgcgctccggatgaatatgatgatctcatatcaggaacttgttcgcaccttccttaggtgactcaatttcggtatagtgagtttcttttgggaggtcttttctgatgacttcctcgccgaaaacatttttaaatgaatatttaccttgcaatggatcaggaatgatcgatgcctcatatttaataacatcattatcaaaatatattccgagatgctctaacattccattttttaattgattctctgtaaatgcgatcgaagtgccagcaacgactgtattgccaagccttcttaacttgctatgaatgtttttaggtataacacgtatattcttcttcatttttacctcatacttggtcatcgatgtctctttgctcacgcttgttatgtaaatcattgatgaacataacatttgcaagtattacgctaactaccgcctcaatctgcatataggaaatagcaataattaatgctaaagatgtattttttattacttcttggctctctaaataaagatgacttttgaaaaatacaagtttaactaaatatactacaagtaaagtgatcataacgaaagatgactttagaacacttccaactattgcctctaaccttcttgtatcttccagctgttcggtgaaatcaacagtttctatagttttggggttaacgatacgctgtaaagcatttgggtaaagaaacgctaaccaaattcccataatagtaaaaaccattccagaaactgatacgagaagagtgcaatagttagcaaaatcgttatacacataattaatattagatggtgaaatgattatcagcgatatacagaatatcgctaaggaaggtgcgaacaagttcctgatatgagatcatcatattcatccggagcgcatcccagagggacatcatgagccatcaactcaccttcgccgatagtgaattcagcactaagcgccgtcagacccgaaaagagattttcctctcccgcatggagcagattctgccatggcagaatatgaccgctgtcatcgagccgttttatcccaaggcgggcaatggccgacggccctatccgctggagaccatgctgcgtattcactgcatgcagcattggtacaacctgagcgacggtgccatggaagatgccctgtacgaaatcgcctccatgcgcctgtttgcccgattatccctggatagcgccctgccggatcgcaccaccatcatgaatttccgccacctgctcgagcagcatcaactggcccgtcaattgttcaagaccatcaatcgctggctggccgaagcaggcgtcatgatgacccaaggcactttggtggatgccaccatcattgaggcacccagctctaccaagaacaaagagcagcaacgcgatccggagatgcatcagaccaagaaaggcaatcagtggcactttggcatgaaggcccacattggtgtcgatgccaagagtggcctgacccacagcctggtcaccaccgcggccaacgagcatgacctcaatcagctgggtaatctgctgcatggagaggagcaatttgtctcagccgatgccggctaccaaggagcgccacagcgcgaggagctggccgaggtggatgtggactggctgatcgccgagcgtcccggcaaggtaaaaaccttgaagcagcatccgcgcaagaacaaaacggccatcaacatcgaatacatgaaagccagcatccgtgccagggtggagcacccgtttcgcatcatcaagcggcagttcggcttcgtgaaagccagatacaaggggctgctgaaaaacgataaccaactggcgatgttattcaccctggccaacctgtttcgggtggaccaaatgatacgtcagtgggagagatctcagtaaaaaccggaaataacgccagaaatggtggaaaaaatagcctaaataggctgattcgatgtgtttgcgggaaaaaaatcggcccagatccgcgaaattttaatcaacgagtcagcttgggaagaaatgacctgcttattcgcactttccctaagtatatccatgtgtatttgaagatgcctactatagctttcaacattcaatcctctccagatgctttatttattcttgattgagattgtaaagcttttgattcttttaatataggagaaatgaattcttttcttttgtgtgatatttgttcgtaaatatatgcggctgaatacgttgaataatcttcggaaggaacattgagaatatcacgcattctatatttatctacccaagttattcccttatccgtagcaaacccgacattgtcccaaagtcgtttctctctatcctcagaagaatacttttcgatgatttctttaacttcattcaaggacggtttcgcttctgccttaatttcaatctgtcttgttctggtgtttttctttccggagacaaatgggacgagagtactaaaggtctttagccaatcagctcgtgcatcatttgggtttatgataatagtttctctacgaactatgtgcgtgatttttggtatcaatttgcctaactcagtatgcgtggtttctaagcttctgagcttcatatcaaatctgtacatatatttatataaatcatcgtcatcagtattagataatcttatataacctttctcggttttgttcttaactcttttgctatgtttaactctatttgtaatagatgaatgtacatagtcttgaaatagttcagaatcacaaattgaatgatcaaatttaatcgacactatagtttcaagctcagggataacccaataaaagcatggtcgaccccagataacttttttccctctgtagctatttgtatatttaactacagatgagcttccaatctcaccatcttcactcgcacctaataaagaaccggtactatcagtatcagatttccaaagcatgattaagaaatcaccagtattttcatctttatagatatctttgcagtaacactttgatctgtttggcttttcttttgggtcccatggtatcgtaagtgcaagtgacttcgttcctacccaatcctgtatgaggtcaaaggtttcgctaagttctaaaccataggtattgttatcatttactttgtataaaccgcacttattaaccttgaaaaaattgagatgccctatattcatgctttttccttaacttcttatctttggatatggaccacgaacaaaaattaagcttactcccattgacttagcacaggcaacgtcttctccctagagtttgatcggtttaacgttaaatattgagggagtatgtgagcatttttcgtttctttttgaatggagggatcttaagcagaataatagttaactaattatcctcatggcttagcgtgcaatgctctcccccgtcacgcctgtcagagtcgtagggaggtgatatttatgttggcgcatttatggtcacaggtcgcgacaggtatacatcatgcgaatgaaaagatagtaggtgtgtggcttcagaagctacaccatcaacaccgaaatgacggatttatcccatcctctgggcagccttctcttacccctaacctgaccgcctcaaaggcacgccacaccctcgaacctctccgttcgacccatcgctccacctgcgaacccacgcagcgcagcgacgcgctcaggccacgaaattaaatatcattaaataaatactttaccgctggcgcgcagtgctttccccgcctcgcctgcccgcttcgtggggcggttttcatgcaggtacatcggggggctcaggccgcgccgggacaggggccggacaggaataacaaggcgaggaaacgcatgcaaaaccatgcaccctgtggatgcatggcttaattcgggaaaaatagcagtattttcggggattttttgcggagctacttactggccagttccgtgcgccggcgggcataaatcaggctctgtgcgggggtgtatttttcctgattatccacccgcgaagccgcgtcaggcctgaatccgatggccgttaaaatatcgctgtcttctgccgcataattaatttcttcaccggtactcagccacactgacagcgcttcgcgcaggtaatgcgccgaacggtcgagcgcatggccggtcaggagtgcgggctgctgactgagtcccatcagctccggggcgagcgtggcggccagctctgtcccgtgcgcctgcataaagtcattcagccggttgcggatactgatgcgttgcaccgcttcatgggagcggatatagcgcccggcggcctgatttatctcccattttttgacatcgataatgtcgcgcagttcctgcataattgccgggatacggtcatccccggccagcacctgttcctgatattcctgctctgcggccgccagttcggctttacggttcagccaggcggtttcgttcttctgacaggcttcaaaggcctgctgtagcgtgagggtggtcatggtcagttctcccctgattaatgacggtatggcgagctgtagcagccctgcacgttacggggtgccgggggtgtgaccggctccgcgacaggcggcgctttctccgccgggggccggataacctcgtcgatggcttcagtggtgcggaacgtcgccgagcactcaatattggtgcactggtgatagcgctgtttgacgttctccgacagatagcgggaggtgcgggcatgcgccgactttttgcagaacggacagtgcatcatggcagcagcccccgcgctttcaggtcagcctcgcgctgacggattttctcctgccagaccttacgctcgccgggcgtgctggcggcgtcgtggtccatatgcgcaagcgcgacggccgggaagccggtcagggagagcaccggctcatcggctggcgtgacggagaaggcgctcactttcccggtcaggaaggtcaccacctgatgcatgacctctttctccggctcggtgtacccctgatggccggtggtgttggcgagcgggtttgccatcacctccgctttcagcaccatcgcccggaccagtggcccgagggtgtcattcagcgcgcggttaagctcttcctcagcgtatttactcagcacagcatgatgcgcctggcggaatgcccgcgcggtgctgttgcaggtggctttcagctggtcacgttcaaaggccagcacttcggtcaggttgtggcattcctgcgccagctcccggcgggccacgcgttcgatatggccgcttttcagctcatccgtcagcatggcgcccccggcacggaaagcagcacgccaggtgcgggtgtcgctgccgttgtcctgctccagctccgctttctgctcctctgcgcgggtgatggccgtcagggtgtcctccatcaggcgggcctgttcaagatgggccgctctggcctcggccagtcgctccagcgccggtttcaggtaatcagggataaaggtggtgtcggtcatggcaggtttcctcgtggtttcaacatgaggtgattctgccggggcacacacaacaacacgacctgttgcggttgtggcagtgctggcacaaacaggacgttaaaacccggcttgccagagaaaggtctcaggaaaagcatactcaccgtttgtttttttactgttaactattcaccactgttcaccataagaaaaaatataagtaatacagtaagataaagggtgaatagttgagagggtgactgttcaccgtctgttcaccactgttcaccctggctatttattaaccgctgaccgtttttgagatacttagaattatttgggataaataattaatttaaaattccatttagtaattaatcgctttgccaacaatggccaataacggtcaataatggccaatataggccagcacctttttttgattaaaaattagcctgttgtgtggtgagacaccacaaaatgacttgttgccctcagggaaaatattcacaaaatagagagctacccgaggccggacggacacgaccggcactgtatggactttatgaggtagcccgatgcacaccgctttttcttccccgtcttctgcccctgccgcgccgctgatgccggtctctgacaccgttcaggagcgttttattcgcctgcccgaagtgatgcatctgtgcgggttatcccgctccacgatttacgacctcatcagccgggaggctttcccgaaacaaatctccctcggcgggaaaaacgtggcgtgggcgcagtcggaaatcaccgggtggatggctgaccgtatcgctgaacgcaaccggggctatgacgcatgatgatgcccgttctgcaaaaagcccctttttctggcttgcttcccttcgccgtttccaggtatagttttctcgctgtcgcaaaatcggcagccgggcgtgagaacccgagttactcagtggcgacaccggacgcgccatgcgtctttttttgtgtctatgcctatgtgcacctgttgtttacgcatcggttcttaagccgttgctgtatctgcgtaatggtggctcaggcggggcagccttcgggctggccggtacccattgaggccggtttctcacccccgtctgggctaccacccgagcgtgagaactccggtggtggcgataaccgctactcaatggaggttgcccttatggctacgaccctcaccccgtctcacccgcaatttgtcttcgtgtttgccgctgtccgtcgcgcagaccgtcagccccgtatctgtatgctccgcgccgtcgccggagatgaacacgccgcacgcctttccctcgttcgcgattacgtcctctcgtttgccggtcgtctgccggtggcggaggtgcgcgcatgaaacagcccgccatcaccgtaaaagacctcgaatgccttgagcacctgcgtaacgtcggccactttgtcagcgcgatgatgcaggagcaggactgcactaccattcgccgcgacccggcgcaacagtcgcagcttacctccgtgatttacctgatgaccgcccagctcgacggcgtggtcgaacgctgcaatcaccgctggttcaccggggagggcaacgtatgaaaacgcctctgccgcccgtattgcgtgccgccttgtatcgccgtgccgtggcctgtgcctggctgaccctgtgcgaacgccagcaccgctatcctcacctcaccctcgacgcgctggaaagcgccatcgctaccgagctggagggcttctacctgcgccagcatggcgaggaaaaaggtcgtttgattgcctgtgcgctgctggaagatttgatgcaggccgggccgctgaaagccgccccgtcgctgtccttcctcgggctcgccgtgatggatgagctctgtgcccgccatatcacatcgcctgtactgcactgagggagagaaaaaccatgaaaatgaacgtaacggacacggtaaaacaggcgtgcggccactggccgcgcattctcccggcgctggggatgaaagtgataaaaaaccgccatcaggcctgcccggtgtgtggcggcgctgaccggttccgctttgatgaccaggaagggcgcggcacatggttctgtaatcagtgcggcgccggtgacggcctgaaactggttgagaaggtgttcggcatatcggcatccgaggccgccgggaaggtgaacgccgtcaccgggaatctgccgccggtagccccggaggtgacagcggccgcagaggccggaacggaggccgaccgcaaagcagcggccgcgctggccgtcagactgctggagaaaacccgcccggccaccggcaatgcctacctgacccgcaagggctttgccggtcgtgagtgtctgacgctgacagcttcccacaaaaccggcggcgtggcctaccgcgccggtgatgtggtagtgccgctgtatgacgggaccggcgcgctggttaacctccagcttattaatgctgaggggctcaagcgcaccctgaaaggcgggcaggtcaaaggggcatgccatctcatcgacgggcagaaacaggcgggaaaacgcctgtggatagcggagggctatgcgacggcgcttaccgtgcatcacctgaccggcgaaaccgtcatggtggcgctgtcgtccgtgaaccttctttctctggcgagcctggcccgcagcaagcacccggcctgtcagattatcctcgccgccgaccgtgacctgaacggcaccggccagactaaagccgccgcggccgcagaagcctgtgagggcattgtcgccctgccgccggtatttggtgactggaatgatgcggcgatgctgaagggggaggacgccacacggaaggccatttatgccgctatccggccagcggcccaaagccccttcgacaccatgagcgaggcggaatttaccgccatgagcgccagcgacaaagcctggcgggtacatgagcattacggcgaagcgctggcggtggatgcgaacggccagctcctgtcccgttatgaagcagggatatggaaagtcattcagccgtccaatttcgaacgcgacgtagcagggcttttccagcgcctgcgcgccccgttttcatcggggaggattgcgtcagtggtggagacgctgaagctgattattcctcagcaggccgcaccggcacgccgtctgattggttttcgcaacggggtactcgatacccagagcggcctgttcagcccgcacagcaaatcgcactggcttcgcacgctgtgcgacgtggattttactccgccggtagaaggggaaacgctggaaacccatgcgcctaacttctggcgctggctcgatcgggcggccagtggcaacccgacaaaacgcgacgtgattctggccgcgctgtttatggtgctggcgaaccgctacgactggcagctctttctcgaagtgaccggccccggtggcagcgggaaaagtattctggccgaaatcgccacgatgctggccggagaggataacgccacatcggcgaatatcgacacgctggaagacccgcgtaagcgtgcctccctgattggcttctcgctgatacgtctgcctgaccaggagaaatggagtggtgacggtgcggggctcaaggccatcaccggcggcgatgcggtgtcggtcgacccgaaataccagaacccgtactcaacgcatatcccggcggtgattctggccgtgaacaataacccgatgcgcttcaccgaccgcagcggcggcgtgtcacgtcgccgggtgattatccacttcccggagcagatagccccggaggagcgcgacccgcagctcagggataaaatcgcccgcgagctggccgtcatcgtgcgccagttaatgcagcagttcagtgacccgatgagtgcccgttcgctgctccagtcgcagcagaactccgatgaggcgctcagtattaaacgcgacgctgacccgacctttgatttttgcggctatctggaaatgttaccgcagaccaacgggatgtttatggggaatgccagtatcatcccgcgtaattaccgtaaatatctctatcacgcttatctggcctatatggaggccaacggctacaggaacgtgctcagcctgaaaatgttcgggctgggactgcccatgatgctgaaagagtacgggatgaattatgagaagcggcacacaaagcaggggatacaaaccaacctgtcgctgaaagaagaaagctacggcgactggctgccgaagtgcgacgaacccaccgcgacttaacctgtctcagaccggcaacagccggtctttttgtgtcagcccctccctcaagggtgaacaatccactgttcacccttcaccgtatgttcaccctgtatcactatgaaagtattaataaaaaaccaaaggtgaacagtgtgaacagttaaacccaaaaaaactttttaccccccccccacctcatcaccatcgtattgcggtgatgttcgccggaaacaggccagagatgcgctgaggtgaagagttgactgttcactcttcaccaactgatcaccatctatcattatgatattaaaaagaaaaataaggaggtgaacagtgtgaacagttaaatgcaaaaaaacttttttatggtatttgagttccggttaggatccgggtttcggatcctaaccgaatggggcattagtctttaattagatagtaatatcaaacagctaagtttgatatggtcgcaaaaatggttgggggcacaaaagggggcatataatttatgatttatatattatctgtttaatttcattaagttacgacataatttgagtccggccttcgcaccatcggaacatcaatagacgtcgacggacgtcttttttgtgcctgaaatccgcgctacgcaaggcttttcgcgattctcctttcaacagaagtcaatctgagtcaacctgtaagtatcccggcaaaacgaaccattcacttttagagatcttccgacatactgattatgtccccagaggagatcgctatgcgcaagatccgattcactgaacaccagatcatcgccgtattgaagtccgtcgaagctgaacgtaccgtcaaggatgtttgccgtgaggccgctatttcggaagccagctattacaactggaaggcaaagcatggcgggatggaagcggtcgatattaaaaaaatcaaagatctggaagacgagaatcggaggcttaaacagatgtttgctgatctcagtcttgagtgccgggcactgaaagacgtcatcgaaaaaaagctttaaaaccagcgataaagcgtgaactcgtcagctatctgacgacgcaatttgccataagtttacgccaggcctgcaggacgttatcgctgagcaggacggtgtatttttattagcccgatacccggcgtgatgaacccgagatccacgcgctgactgaactggcagaacgctatccgcgctacggttttaagaagctgttccagctgctgcgcaggcagggcaatacctggaaccataaatgtgttcaccggatttattgcctgctgaaactgaattttcgtcgcaagggaaaacagcggctgccagtgcgtaattcagcacccctggcgacaccgcaagcgttaaaccagagctggcccatcgattttatgtacgacgcgttggtctgcggcagacgcttccggaccttcaatgtggtggacgattttaaccgtgaagcactggcgatagaaatcaaccggaatatcccggctcagcgaatcatccgggtgctggacaggatcgtggcaaaccgcggctatccgctgaaaatgcggatggacaacgggccagaactggtctcgcgggcactggcacaatgggccgaagaacatggcgtgcagctcgaatttattaaaccgggtaaacctacacaaaatgcttttatcgaacggttcaaccggacataccggacagaaattctggatttttacctgttcagaacactgaatgaagcacgggaaattaccgagcgctggctgatagaatataacaacgagcggcctcatgagtccctgaacaacctgacgccggaagagtaccggctgatggctgaaaaaccggaactctcaaaaagtgcgtggaactaaaacaggtgtgcttaaagtggtatcgacattactgtcgtaacggataaaagctttaatacccaaaacgtcagttatgaaaagcgcaaagcaaaacagcagcgccttaatgatgcagtggaaaaactaaatgcgctgggcattgtgactatgttggtcaaccgtgttcacagtaaaatcgtgattggtgatgaagggctgctgtgcataggatcgttcaactggtttagcgctacgcgtgatgagaagtacaaacgatacgatacgtcgatggtataccgtggcgaaagcttacaagcggaaattaaaacgatttattccagcctggagcagcggaagttataggggcttatcgcaatgcaggtatcgaatgtgttgaattaatttagcgctactcaaggaggtatagcttcaagatactatgcctccaaaccatgcggttgcatttggatggcttgtttggcgagggtggtttaaataatcagttgaactcagaaaaggccacttttttgaatggcctttagtctaaggggaatttatgccgttgccctgtggttccaggaatctttgtaaatgatattcccatcgcaatgtttccaggtgatggcctcataccttaactgaatcgtctcgctgtgcgtacctgtaccagaatcaggaaataagttgggggtaattccggttacttttacattctctaatgtaatattaaaatattcgctttcaacacctgcatcaaggatctgatacatctttatggttgccgactttaatgtttggttctcactcagcgctttgtataaaaggggcgttgttttatcaaaatctttctgtaccgtaataggcgtatgtactctggttcctgttaatctcccggtgtttccatccacaggaatggataggtggtgcgttaccgcttttaattcaatagcgccaatacgccctgtaacgagagaactacccgttataggggagccgtttgtatcggttagccaaagatatgctggatttgacatgattattccttatctctatttataaatgaaggtaaacaaaacattataatgacccataaaaacagaccaataaccttaaccggccacgggtcaagtaaggctatgcaaacaatagcgccaataattaatagtgggcctgatagtaaattaaaaataccgcttaacacacctatctttgttcccagtaatctattcaatgcaatggcgatgatataagcgctaccgattataatcgtcactgcgattattttattctgccagttattaaactcagtcaggcaaataaagcatgtggtaataatataggtgcagagaactatatcgacgagtggcgtgatgatttttttcatatcacccagccttagcattcgtatttaaatgatcttccactcttttcataatcttgtcgaatacggggttgccctcggtgtaccctgcatggatggcatccacaaaaggttgtaccgcatcggcaaataagaaataaagcagatcataatcgcggggtcttaacaacgagtatacctcgggctcttcattcctgagtttatcagacgtcctgatggatcgctctgccattccaccaaacaagaggatagtacttaaaaaggctattggattccctttccccttaaatactacataagtaaatgacgttttttctataacggctttagcgatgttcgatgcgataatattcgtagagattctacccacgatagaggtaactacacttctgtatattctatcttgttctgattcggatagatatttattaaataactgaaagattaatttaactgcattaacgatattttcatagttaagaatgtcatgtcttatcgcggtcatcatacggattctttctgtttcacgttcatatcttgtatccgtatcaaagataccgtaaatcagataaccataatctaaaggaacagataatccaccattgataagccctgtaactgtatcaggagagataatgatgttatataacttccgcgctatcccttctatgtctgccatatagctatcctatgtttaaataaatgactgaggatgtacatcatttttgcaagaaataatcgatggtaatttacaagagaataagtaacttgataagtgttactataacctaattgttacaaattgtattgcaaaatgattttgaaccattgatttaaataaggcttaaaacagcatagtatatcactttacggttgattattatgatgaattatcttggtgtgagatgtattaatttaataaataataaagcgcatataagtattcgataagtgattggatacgcaaaaaatttggatgttaaaattattggtttatatgtatttgctctgacttgttcatggcagaaacgggttatgactcatgaacaggcggtttatgtgaacacatcgacagcatcatgttgtgccgtcgatatccttcacgagcaaacattgacggattcaccagagtgatatccgcttccggcgtgagagcgggggctacagccgattctttgaaaataaataaaagcagggctaataccaatcgtttcattacgtcctgccgcgaactacggcgggggaatagcgattggtttgcgttatggcgtgacgaccgcggaattgacgatgagacgtgggtagagggtgtgaaacgtggtaacttccgtttgcatccgggtacggtttccgagggttgtattactatcgcccataattctgattttgccatgatccggaatgcgcttatgaatacatcgttagtacaggttccctgcatccgttccctgatggctcgcggttgggtggaggttgttgccagtggctctaataacgcttgcccgtaaaatcagtaagattatttattttatattgctgtttttggttctgggacgtgcacttccaaggccggaaatctatctcgattatgatatcgcaagggatatttgccacttcttgttcgggagtgtgaacgccgatacgatgtatgacactttcttttatatatcactgataatagtaatattcctttcagctgtactctacattattacattgcagctaatttcaacgataaggagcaaatgagatgccaattcctccgtatatgtgtcttaaagacgatggtggcgcagacacgaaaggagctgttgatgttcaggagcgagaaggcagcatcgaaacccgcttatcaccatccccccttaccccctgaacacctcccgccggtgccatgccacaaacccctcctggggataacattctttcccctgcggcaaggtaatcggcttaccatcaaaatcccagaacagcctgccaacgatgcctccgccgttcaccgctggcgaaacctggatgcgcatatcctcatccagaccaatggatcctttatcaaaagccttatggtgaatcgcgcagagcgccaggccgttagggatttcgcatgggccgccgtgctgcttccatttgatatgggccgcttccagggcgacggaggtattatcatggcgcatattgaagccgcagatcgcgcactcatagttataggcgcgcagcacctgctggcgaaaatgcgggtcgcgctctttgcggatctgcagcagatcaaaccccatctcttctgccagttcttcctgaatactctccggaaagtgcgcctcgaggatctgatgggcgagggtattgatcagcctcttatttctgttgagtaacgcaaaatgcggctcatcgaagccgccggcgacgtgacagagctccagctctttgccgggcggctttcggctgccctggattgagcactgctcgctgttgtgcagctcccagaagccgtcgcctttcaggcgccagaacggcatgtccggccggtactggcggcgctgtgggccaaagcgttccagcaggctatgcagctcatcgcgtatctccgaggcgtagtcgaacatccgcgcatggccgcgctggtactgggaaaggacgtacagcagtaacagtggcttatgcggcgcacgctgttcgcctttgcgccagatagtgatgttctcgatcgcgtgttgcagggtcgtgctggagggcatagcgttacattggcagctaaataaatgcgatgatgctcgcaaaatccttgccgatcaacccaccagatgcggcgattctacgtggatcgctatttaactatcactgctagttatttgttcgaaaagcccatagctttctatttatactcaagcttcgcgccatcagatagctatgtcttatgaaaaaactaccggaccatttatccagggaatgcatcatcgctgccattcgcgcttacgatgcaggcgttgcgcatcagtttaaaagcgcgcgtctgtacgagatcgagtttgaggggcgtcggtatccttcaaaagccatcgtcgggttagcggccacgcttgccacgggaacggaatttaccccggcggatttcagcggagggattaaatccaaatgcgtgcgtctgttactggatcaaggatttacgatcgcgtcgcagggcgctggcgatgacgaggttgcgcttttccccgatgagggacagacgactatggagttcgtggaaggggcggcgatgcaggtggtggtcaatcgctatgagcgcgaccgtcaggctcgtcaggcggcgcttcgcctgcatggctgccggtgtcaggtatgcggtctggatatggccagccgctatggcgaaatcggccagggttttatccatatccaccatctcattccgctggccgggatcaagcaggactaccgtctgaaccctgaaaccgatctgatcccggtatgtcccaattgccatgcaatgctgcaccggcgagatccgccgtttactcccgaagagctgaaggcccggctgcgccccgcagactgacatcctacagcgctcgctttaattacatcacacacagcacaaaccccacgctacctcaccggtagcgtgggccagctttctcttacttatcccgcgtctcgccagcctcccagctatagctcccatcggccgctaacctatcgcccagttcctgatactcgaactgataaaactcagcctgggtgccgtacccggcgtagtctaccgccgccaggccgacgaacgccccggtaaagaacccgccgtagctctgcaacacatagtcatcggacagtaccgcggcatccagctggaccgggatctcggtgaacgtcacgccatcgaagctgtattcatagctgtaggtctgcttgcggactttagtccggaaccagacgtattcgacgccgtccggcaccttgatggcgttatctttcaggtacgacgtgtatttcccgcggttattttcgccgacttcgatgaccttgccgttaatttcattccaggtcaggaagacgaagctccagtggcggtcgttatagtaattcgttaacccggccatctgctggtagctgaagggctcgaatttcaccttcaccgcggcgtcaaaatagaaggcctgccagcggcgggcaatcagcgacaggtcatgcgtattggctaacgaaccctggccgattaaggttaatttgccgtcgccggtggtgcccattttggccgtaaacggcacccgcagggtattccagttcgggtcgagcgctggcgaggtaaagtcatcctgctggctattatcgctggcgctttcggtgaagatggcgtcttttggcccttcgacgaaggttttcccgccgtgaccgccttcaatacgcggccagccctcgtcgtcccagtacactttctggatcgcggtttcccggccgagggttgaccagccgcgcgggtcgtagatggattcccccgggcgattccacggccgggcgcagagcgaggcgtaataccattcgccttccggagtggagaccagcgcgccatggccctgtttctggatgtagctgtccggggtatcgacgttggttaagaacacgtcgcccggctcggtttcgaagctgtcggcctcgagggttttcgaccgcgccaccacctcctggtgggtaaacacggtgccgccctgggcggcaaacagatagtagtagccgttcagtttatagaggtgcggcccctcgaccagcgccacggcggtgccgcggtagatggtgcgcgcggtttccggcattaacttcagcgtcttggtatccagctccgttaaggtaatgccatcgaaggggtgatggtactcccggtgatcccaggtttgctggacgatatatttccggccatcgtcgtcatggaacagcgaggcgtcaaacccgacgccgttcagcttgatcgggtcgctccacgggccccgaatatccttcgccgtggtcaggtagttggtcatgtctttaaaggcgccttcggtgaccttcacatcggtatacaccaaccagaattgcccgtcggcccaggagagcgccggcgcccaaatgccgccggaggaggggttgcccttcatatccagcagggtggtggtggagagcggcgaaggcagcaggttccagtttttcaggtctttggactcatgtaaacgcacgcccgggaaccactcaaacgtcgagttggcaatatagtacgtatcctcgacgcgaataatactggggtcggcattaaagccgcgtaatatcgggttttgaataagtgacatttcattacaccttttaaaatggaaagttaaggatcggtctgatttataatttttttaactacacgcggatctcatccagctgacggttgatgtcggtaacatgtttatcggagatcggataaacctgcatgatcaccatcgaaatagcggccagcgcaattgggatccacaccgcggtcataatgatcccgtcgatggcgctggcgctctgcacggcgccgctttcattaaatccatacaccgccagcagccacagcgggatagcgccgccgatggtgaagccgatcttgaagaagagtcccataatggcattgataatggcggcattgcgtttgcccgattttaattcgccgtacgcgataacttccggtaccagcgcccacataaagccggtggcggaggttaagccccactgtttaataaaggtggcgatgtaggccagccacagggcgtcgtgcatcccttcgcgggaccagacgtaggtcagcagttcgccgacgatgaacatggcgaggaacagatggaagaagccttttttaccaaagatttttttcagtttcggccagaacaccgggaaggcgatgccgggaatagacgcgacgagacccaccgcgcccatccattcggaatggccgacgacgaactggttgaagaagccgttaacggtgttcatgaagaacatgaaggtaaaggccagcataaagaacatgccgagaataaccagcggacggttatgtctgagctcgtggaaaaggtcggtagttttgacgttggcggtctgctcggcggtcgcgacaacgcgttctttggtgcatttgtagcagataaacagggccaccgcgccgatgatcatatagatggcgtacacgccgaaccaggcgtagttcgctgacggatcggtatagttgcccagattcagctcaaggccgaaaaagccggtgtctttcaggctacgatctttcggcgccgccatctgcacaaacatcgggaacagggtatagaccagcaggttggcgctgttggccagcatcatgcgggtactggtcagcttatcgatcgattccgggtcgcgggtcagcgaggcattcagcgagccatagggaatattgactaaggaataaaccaggtccagcgccagataaataataaaggcgaaagccaccgaacctttcactccggggattggcgcgaacagtaatgccgacaggatcaccagcggcacgccggctcgtaacagccagggacgatatttccctgcttttgaggttcgtttatccacataggttccgaccatcggatcccaaaacacgttaatgatgcggacaaaaagaaaaataaagcctgccgttgccgtgctgatggtatttaccgtcagcatatgcaaagccagaaaacccccaattgtgccgaaaaccaggttttgcgcaaagtcgcccatgccataaccaattcgttctccgcgggttaatttatgatattcatcatgccgactgtgcattatgtttttactcattctaagcagactccggtttgttttgtgtaggtgaaacactttctgacacagttgaccaggaagaatctattacgtttttaaattacgtaattatgtttttttacttctgtgatcctcgaagcaaaggcctgtatcacctgcgttaaaccgttttccgccgctaattttcgggcagacagacaaagtgacaaaaccggcattttaatttgatatggatacctgaattccccagggagtgtacgctatacgcgcgcgaagcgagatatttaaaatagttttatttgcgagatggctcacatttgagcattttctcaatcgccgagtgaaataacgtaattgagcaaccgacgatgagaatacacgatgtgtcacagttgttaattttcctgtttctcaatttcggagttcatcatgcaaacctatttcgaccagctcgaacgcgttcgctttgccggacccaaaaccgataatccgctggcatttcgccactataatccggatgaaatcgtgctgggaaaacgcatggcagaccatctgcgttttgccgcctgttattggcataacttctgctggaatggcgcggatatgtttggcgccggttcgtttgagcgtccctggcaggccgcgggcgatgcgctggaaatggccaaacgcaaagcggacgtggcgtttgaatttttctacaagctcaacgtgccgtattactgcttccacgatgtcgacgtctcgccagaaggcgcgtcgctgaaagagtatttgcataatttcgccatcatgaccgaggtgctggcggagaaacagcagcaaaccggcgtgaaactgctgtggggcaccgccaactgctttacccacccgcgctacggcgccggggcggcgaccaaccccgatccggaggtgtttgcctgggcggccacgcaggtggtgaccgccatgaacgctacccaccagctcggcggcgaaaactatgttctgtggggcggccgcgaaggttacgagtccctgctgaataccgacctgcgccaggagcgtgagcagattggccgcttcctgcagatggtggtggagcacaagcataagattggctttggcggcacgctgcttatcgagccgaaaccgcaggagcccaccaagcatcagtacgattacgatgtcgcgacggtgtatggtttcctgaagcagtttggtctggaaaatgagatcaaggtgaacattgaagccaaccacgccaccctggcggggcactctttccaccatgaaatcgccagcgccatcgcgctgggcattttcggctccgttgatgccaaccgcggcgatgcgcagctcggctgggataccgatcagttcccgaacagcgtggaagaaaataccctggtgatgtatgagatcctcaaagccgggggattcaccaccggcggcctgaactttgacgccaaagttcgccggcagagcaccgacaaatacgacatgttctatggccatattggcgccatggacgtgatggcgctgtccctcaagctggccgcgcgcatgattgaggatggcaagctcgatcagggtctggcaaaacgctatgccggctggcagggcgagctggggcagaaaattatgagcgggcagatgtcgctggataatattgcccgatacgctgagcagcataatctgaatccgcagcctcagagcgggcgtcaggaattactcgaaaatctcgtcaatacctatatctttggttaatttttgctgacatgctcccgcgggggcatgtattccgccgtctatccgctgccgggaaatagcgtttattggttcgtgctgtgttttttttgtcagtggcgaaagaccacctgtttaatatcagcgaaggaggaagggtaacgataattgtgtaacgcctctgtgaccgtacaaaataaaaaataacttgttctgatgatagcgacatattctgtcagctcagaataggctggttattgtctgaataaaattaacctatattgagaaactcatgacaatgataaaaaaacttccattaaccatggcggttatcgccgcgttttttccacttacctctgtaatggcgcaagaatttactcaggaacagatcgacgccatcgttgccaaggccgttgataaagcgctggccgaccgccaggcaaaaatcgacgccgcggccaacaaaaaggtcgacgtgattactaacccggaaaccaccgccgcctcgccggatatggccattccgtttggcctcaagttcagcggctatgcccgctatggcgctcacttccagaccggcgaccagaaatatgtcggcgtcgacggctcctataacggcgcctcggcgatcggccgtctgggcaacgaaagcaacggcggcgaattccagatcagcaaggccttcaaaagcgcgcagggggctatctgggatcttaacgtgatgttcgaccactggagcgacgaagttaacctgaagaaggcctacgtcggggtcaccaacgtgctggaatccaaccccaacgcctatatctgggccggccgcgacttccaccagcgtccgcaacaggggatcaacgactacttctggatgaaccacgacggccagggcgccggggtaaagaactttgatatcggcggcgtgcagttcgacgtggcggcggtgtcgcaggtgaaatcctgtagtccggaagtgatggccgacgagaccaacccgtcgcgcatcacctgtaccggcagctccgacaccggcgacaacggccactacgcgctgaccaccaaaacccacaacatcaaggccgggccgatcgacgtcgaggtgtacgccaactacggctttgactcaaaggcggtggacagcgacgcgcgtctcgaagcctggcagggcggcctggtgctgagccacaccaacgacagcggggtgaacaaggtgatcctgcgctactccgataactcggataacagcgtctataacaaaaccgacgacctgaccacggtctacgccagcttcgagggcagccataagttcacccagcaggcgcaggtggaatatctgctggccttccacgactacgacaacggcagggacaacaccgacaaccgcaagaactacggtgccatcgtgcggccgatgtatttctggaacgacgtgtactccacctggctggaagcgggctaccagcgcgtggattacgaccagggcggggataaccacggctggaagctgacgctgtcgcagaacatagccatcggcatggggccggagttccgtccgatgctgcgcttctacgtgaccggcggccaggtggacaacgagcataccgcgaaggttaacggcacccaggaccagcagctggattcgctgaacgtcggcgggatgtttgaggcgtggttctgatgcgatagcgttgtcgaaggagcgttcccggctggcgctacgcttagccgggctacaactgatgcgctccatttatgccggatggcggcatacatgccttatccggcctacgttccttcctgcgggctccccccaggaccggcaagcgcagcgccgccgggcggtcaggctccatacctgcggtagtgccggatggcggcataaatgccttatccggcctacgttccttcccgcaggctcacacccccaggcccgcgcaagcgcagcgccgccgggcagctggcccatcccccttcagttcaccgtcaggcgcagggccagatcctgcgggtaggggtcaaaatagttctgcgcctgcaggtagcgatccggatactcggccagatagtgcttaagcagcgtcagcggggcgaggatcggcagcagcccggcgcgatagttgaggatcacctcccgcagctcgccgcgctggcggctgtttagctggtcgcggaaataaccctgaatatgcatcagcacgttggtgtggtttttccgcgaggcgggctgcttgaggatcgccatcagcttctcgcggtaaacctcgaagaacgcctccagatcctcccattcatgcagcgaggcgacgaacgggccgatctcccggtagcctgcctggtggtgagccagcagctgcagcttgtagcggctgtgaaaggccagcaggctgtggcgcgtcaggccgcgggcgcgcagggcgttgagttcatgcagggcgaaaacgcgctcgacaaaattctcccgcagcagcggatcgtgcagccggccatcctcttccaccggcagccacgggtagcgcgccatcagggcaccggtaaacagccccacgccttccttacgcccgcgattgcctttttcatcgtacaaccgcacgcgctccattccgcagctcggcgatttggcgcagacgataaagcccgacagctcgcccagggttgcgaggtgggcgctggcgaaatcagccatcttctccgtcacatcctcgtgcggggcgtggctgaagcgcatgcggatctccccgaccggggtctgcaccaggcggagcgccgggcggggaacgggcaggccgatcgccatctccgggcagacgggtttaaacgccacccactgcgcgagctcatccatcacaaagcccatacgcttatgcccgccgtcgaatcgcacggctgagccggttaaacatccgctgatcccaatgacaggttgcgtgttcatggcgctgtcctctcttctgctgtggttcgggtaaagaaaagggtcacggtggcgaccgtaatgccgaatttcttcatctcggttttgttaaacaaatggctgccatcctgcaggaacatccagtcgtcaaagtgcagcagccaccggctgccgctggcttcgacgttcatgctgtagcgccagtgaaaggcattgcctgccgcctggccgctggccacgccttcgatgtccccggcggtgccctgataacggttatcgccggtgcggcgaatgcgccacacccgctgctgcttctcgccatcgtcatagacaaagcgctcatggagcgtcagggtgtcgccgacgacgtcgccatcgatcgctacatggaagcggcgcagctgcttgccgctgcgatcctgcaccatcccccacgcctcggttcggccctgaaaatagtggaaaatgtcgagggcgggctgctgctgccggtactccgtgacctcggtgctgcagccggcgaggatcagcatcagcagcgccaggccaagggtcagaatgcgtttcatggtgtacctccgatcaactgctgacgcagttcgggataagtggtgcgcggatcgagccagatggcgagaaagcgggtgctgaatgccgccgactggcgcgggccgagcggggtaaaggcggtctgcgcggcgctggcgcggtaccagaactgtccctcgctgccgctgtccacgaacgccagctggctgcccggcgcgacgtccggccagatcccctgcagcatgcgcagccaggcttcgctgcgcggctcctgttgcagaatgccctgcgcctgccactggtcgcgggtggcctccaccagcgcctcgcgatcgatatcgcgctggtaggtgatgatcagcgcccgatcctgctgcgggccgtcataccggccattgggtgtgcgcagctgcgagtgatagacggtgaacggcccccaggtgagggtcgcctcgccgacgcggcgccacgtcagccagtcggcggcgtgtgccgccggggcaagggtggtcagccacagcagtaacagcgcgaatctcattttcgcctccccatccccagatggaataacagcatgagcaccagccagccgcaggccatggcggccacggcaagcgccatcggcaccagcagggtcatggctccgaggcgcgcgccgagcaggtaggccaccgggccgccgacggtggcggccgcggccagcacccagccgggaagcgtcgtggtgcgggtcagtcgggtccagacgacggcgaacatcagccacagggccaccatccacaggggcagcaggctgtcgccgcgaaaatcgatcagccccgccagcgcccagcaggcgtccaggccgcagcccgccgcggccaacagcagggcgggcggacggctggccgccggcagccgcagccaggcgaagagggccagcgtcagccagatcagcagaccgcgctcgcgcaacatcaccaccagcgtccagtaaacatcgaacgcgagggccatcagcaggtactgcgccgggcgtgtcatacccgctccgcggtgagctgcaccacgctgatggtgcgggcgttaaatccggcttcgcagtagccgaagtagtagagccacatccggcggaagcgctcatcaaagccgagcttttcaatatcctgccaggcgtgggtaaaacgctgccgccagtgcgccagggtgcgggcgtagtccgggcccatgtcgaacaggttgcgcaccacaaaatcggtatggcgggtcatcagctcgctcatcgcggtgatgctgggcaaaaagccgccggggaagatgtagcgctggataaaatcgacgcttttgctgtagtcgcgatagcgctgatcctggatggtgatcgcctgcagggccattctgccgcccggacgcaggcgcgcctggcaggtgcggaagaaggccggcaggtagcgctggcccaccgcctcaatcatctccaccgacaccagtttgtcgtactcgccgcgcagatcgcggtagtcgcagagcagcacctcgacgcgatcctgcagcccggcgcgggccatgcgctcggtagcccagcggtgctgttcccgggaaagggtggtagtggtgacccggcagccgtaatggcgggcggcgtactcggccagcgctccccagccggtaccaatctccagcagatgatcgccggggttgagcgccagctggtcgcacagacgcgccatcttggcccgctgggcctgggtcagatcctgctggtcatcggtaaacagcgcgctggagtagagcaggtcctcatccagaaagtgggcgtaaaattcgttgccgaggtcgtaatgggcggcgatgttctcccgcgcctgggcgcgggtgttgcggcgggtccagtggcgcaggcgggcgacgggcttgcccagcagacgaaagccgcgctccagacgccccagcaccttgccgttgcgcgcgaggatctgcagcagcgccgtcagctggtggctctcccagtcgccgtccatccaggcctcggccgccgccaggctgccgccggtcagcagacgccagtacacctccggcgtgcagacccgcgcctcggcgcgcagcgcggcggcggggtcgccaaaatgaaaagtctgtgccccttcgcgcacggtgagcgagccttcgcggaggccgctcagcagacgaaagagcagccagcgcgcgagccgcacgttgcgcggcacatcgggttcaagcgcaaagacgggatcggtcatgagcgttcactcctgctgacaggatggttgtacagcggcacgcgcttcagccacagccgcagcgcctgccagtagatcgcgaggacggttttcagggtcatcagcggcagacgcagcagcagcccgcgcaggttggcgcgggtcaacggcacgcggctcagggccagggtggcgtcgaacaccttgctggcctgatggttttcaatatgcatgtgcagcgttttgccgggcgcgttgaagcgccagtgatagaccatgtccatcgggttaaatggcgaaacgtgaaaggctttctccagcgggcgcgcctgctggccgtccaccgcgtagtaatgacgctcattccacggcgtgttacgcacttcggccagcacccagcgcagggtgtcggcctcgtcatagcagtagtaaaagttgaccggattaaaatggaagccgaagtagcgcagctgggtcaggagcatcacgcgtcccgccgggcggcagccggtcaggctctccagccggttcagcacctgggccttcagcggcgcgcccagcggataatcggcgtcgtaccaggcggcggcggccaggcggttgcggcggatgcccgcctcaggcagcctgtccagttcgtcgaggtcgagccaggtcataaacaggcggtagacgaagtggtgcgccttcggctgcaggcgacggtggcgcaggacgccctgatagaggcagctgttcatatcacttgccctccgccgcggcgatgccctgtaccacgtcgagcgcgctgcgcaccccgtcctcatgaaagccgttgtaccagtaggccccgcagtaccagctccgctgctggccgttaatctcttcgcgccgcagctgggccgaccagctttgcgggttaaacagcggatgctcatagacgaagcgctgccagacatagcgatcgtccaccggcgcgtccgggttcagggtgacgcagaacaggggggcgcccgcaggcagcccctggagaatattcatgttgtaggtgacgcaggcccgggccaaatccccgtcgctcaggcgatagttccagctggcccaggcgcgctggcgctccggcagccagcgcggatcgctgtgcagcaccacctcgttgcgctgccagccgatatcccccagcacctcacgctcggcgtcggtgggcgccgccagcatcgccagcgcctgcgcggagtggcaggcgaagatcacctggtcaaaatgcgcctccccggacgccagccgcaggataactcccgccgggtggcgctccacctgctgcaccggcgcgttgagccgcaggtccaggcgatcgccgagcctggcgagcagggcgcggacgtattcccgggaaccgccgggcaccacgtaccattgcggacgatcgcgaatatccagcagaccgtggttttcaaagaagcgcaaaaacagcggcagcgggaagcggcgcatctcctgcagcgacgacgaccagatggccgcccccatcggcagaatatagtggcgggcgaagaaggggctgaagcggtggcgggtgaggaagctctccagcgtcgcgcctggatccagcgcctcggtcagcgccagtttcgccaggcggttgaagcggacgatctcgctcagcagtccccagaaggccggcttcagcagattgcgccgctgggcgaagagcgaggtcaggctgtggccgttgtactccaggccgctggtcgggttgtggaccgagaagctcatctgcgttttttgcccgccgatccccagctcgctgagcaggcccataaagcgcggataggtgcgatcgttgtagacgataaatccggtatcgatggcccaggtgccctgcggcgtggcgacatccacggtggcggtgtggccgcccggcgtggcgcccgcttcgaacagcgttacctgatggtgtccggccagtcgccaggcgcaggtcagcccggcgatgccgctgccgatgatggcgatgttcatgagcgcaccatcctgcgcaacagcaggcgctggatacccgatggcagactggccagcagccgcagggccaggctgaaaccggtggggaaggcgatgtggtttttgcccttcgccagaccgtggcggatcgccgccaccgcccgatccacgctcacccggccgggcatggcgaagtcgtttttgcgcgtcagcggggtgtcgacgaagcccggagagaccaccgtgacggcgacccctttcggctcccagtccagacgcaggctattggcaaaccagatcagcgccgccttggaggcgccataggcttccgcgcgcgggaagggcagccagtgcgccatggagctgaccagcaccacccgatcgccagcctccagctgcgtctgcagcgccgccaggcagttcaccggcccgaggaagttggtggccatcacccgctccacgagggcggcatccacctgtccgtggtcgaggtattcgcaggtcccggcgcagagaatgatcaggtcggcaaaacagcctgtcagcgcctggcgacaggcgtccctgtctgtcatatcgaacaggcgtacgctgatgttggggctgagctgctggagcgctgccaggcgcgacgcatcgcgcccgcaggcgatgaccagatggccatccgccgcgaaggatttcgccaggccggcgccgatcccggagctggcgccggtgatgagcaccgtcatcatgagcgcaccctccgcttcacgccgcgcaccgcccagcccagcaggggaagatgctcgtagatcatctccccggcgtcgtagtagtcgcgctgatggagaacctgctccccggcgatgtccaccaccgagcagcccggcagggccagggtttctccgccggcaatgcgcggatgcgaccagtgcatggtccaggtcacggcgaaccgctggccgtcgcaaagcggcgtgtcgatggtgaaccggcactgctccacgttggccagcagatgggtaaagtagcgctgaatggcgaacagcccctgatgctgaccaaaaggatcgctcagcgtcgcgtccggatggtacagcgtggccagcgccgcgggcggctgtgcatccagcccggcgtagtactcaacgaaacgacgaatcacggacggcgaggtgctcatggatcacatcctggctagatacggtagcgtaatggcatacttaaaacttacacaaataaaattgtttgtccaagtttgtagaaaaatatattttatttgtgttaaaaatcatgttgttatgattggtgttttaaggagtgaaagtcgcgggtggcgcaaagggcaagcgtgagcccgccgcgccaccgggtgctggcggaacagagcgtggaggtaagtgaaaacagggggttagagcgggatcacctcgagggagacgacctgctgctgccagagttcgacctgcctctggcgggcagcggagagtttgccgctggtgaccagcagccagttgcgctggggaaaaatctccggcgccagggcggcgggaggcaccggcaggacgtcgatgcgatggccctggccggtacgtttgagcgcctcaagccagatttcgcaggcgtcggtcaggtgccagccggtgatcagaaagttatccccgggcgccttcttgtcgccttcgaggcaaaacgaggtgtaggcgatgatgatgccgtcgaggatttcgcgcagggtcatgatggccggtacgttggcggagacctggctgcgcagcggacgcagcacctcggtcaccagctcctggcgcggatattcgcgcccggcatcgtagatcagctggcgcagggactcgatttttccctctttcagccgctgcagcatggtctcctgcagcgtcaaccagttattggtgcgccgcgcgccggggcgcgacagcaggggtttcacctggctgaccggcaccccttttttcacccagtcgaggatcttcagcgcctgctggacgtcgtcatcgctgtacagacggtgtccaccatcggtgcgcagcggcttaagcaggccgtagcggcgctgccaggcgcgaagcgtggtcgcatttatcccgcatagtcgggcaaattcgccgatggagtaaggcatggaggccacctgttaacaaagaatattctcaatatactacgaatcacgacggctggcgtgaagtgtagtggctttgcactacactttccccaaccgcgtaaatgaaaggagttctcatgaagctatggcctgttgtcaccggcgtcgctatcgcgttaaccctggtggcctgtaaatcgcccacgccgccgaaaggcgttcagccgattagcgggtttgacgccagccgttacctcggaaaatggtatgaggtcgctcgcctggagaatcgcttcgagcgaggcctggagcaggtgaccgccacctacggcgcccgcagcgatggggggatcagcgtcgtcaaccgcggttatgacccggtcaaaaaacgctggaatgagagcgacgggaaagcctatttcaccggcgcccccaccaccgcggcgctgaaggtgtcgttcttcgggccattctacggcggctataacgtgatccgcctggacgacgactaccagtacgcgctggtcagcggccccaaccgtgactatctgtggatcctgtcgcgcacccccaccattccggcggcggtgaagcaggattacctgaataccgcgcgcgagctgggctttgacgtcgatcgcctggtgtggatccgccagacgccgcgctagcctcgccgcttagcggctgagcagataggtataaaccacgtacagcccggccagcgccgccacgttgagcgctacgctgatgaaaaaccgcgtccggaagggctgcttttgcgttttatggcgaaagcactgctggccgaggatggcccccggccagcctcccgccaggcccagcaccagcagcgtggtttccggcacccggcgccaggctttgcgcgccgccagcttgtcggcgccatagataagccatgtcagaaggctgctcagtaaaaaccacatcgccagcgggtagggcagcagggcgctgcccacggcggtgagcagcagcagggaataacataccaggttcagattcatagggacgttcacgccggccagaagaatggcgccactatagccaatttcccggaccggcgtaaacgcggcgggctattggctacgcttgccccgatgccgatacagccacatcagcttatacgccgccggaatgataaacagcgacagcagcggggcggtgatcatcccgccaatcatcggcgcggcgatacggctcatgacttccgaaccggcgccggtgccccataaaatcggcagcaggccggcgataatcaccgccacggtcatcgccttcggccgcacgcgcagcaccgccccctggtatagcgcctcgtcgagcttatcgacgctgaaagtctgcggattctccagcgatggctccgcctcgatggcatggcgcaggtacatcagcatcaccacgccaaattctgccgccaccccggcaagggcgataaagccggtcccggtggccaccgacagatggaaccccatccagtagaggaaccagatcccgcccacaagggcgaacggcacgctggtgataatcagcagtgcttcgccgacgcggcggaacgccagatacagcagcacgaagataatcatcagcgtcatcggcaccatcagcttcagcttctgattggcgcgctccagcagctcaaactgcccggagtaggacacactgatgcccggcttcagcttcacctccttgccgatggcctgctgcagatcgtgcactaccgacaccatgtcgcggtcgcgggcgtcgatgtagatccaactggtcgggcgggcgttctcggtcttcagcatcgatggtccggtgaccactttcacctcagccacgtcgccgaggacgatctgttgcttcagcggcgtgaggatcggcagctggcgcagggtctccgggctgtcgcgatagctctgcgggtagcggatgttgatcggatagcgctcgacgccctctaccgtttcgccaaccatcgccccgccgatggcggacgatacaaacagctgcacatcgccgacggtcatcccgtagcgggccgccttctcgcgctgaatatcaatgtcgaggtagcgcccgccgaccagccgctcggctaatgccgacgtgactcccggcacgctgcgcgccaccccttcaatttgcccggcgatggcgtcgatatcggccaggttagtgccggaaaccttaatgccgatcgggctcttgatgccggtggagagcatgtcgatgcggttgcggatcggcggcacccacaggttcgccagccctggcagacgcacggttttatccagctcgtcgacgatcttctccatggtcatccccggccgccactgatcctgtggcttaagctgaatggtggtctccaccatctccagcggcgccgagtcggtggcggtctcggccttgccggttttgccgaacacccgggccacttccggcaccgccatgatcagcttatcggttttctgcagcatatccgccgcctgcgcagcggagatccccggcagcgtggacggcatatacagcagatcgccctcgttgatctgcggcagaaactcgccgccgacccggttaagcggccagacaaccgtcaggatcgacaggagcgcaatcagcagggtagtcttcggccagtgcagcaccttcagcagcagcgggtgataaatgcggatcaaaaagcgattcagcggattgctgttctccgccgggatcctgccgcggatccagaagcccatcaggatcgggatcgccacgatcgccagcagcgccgccccggccatcgaccaggttttggtgaaggccagcgggccgaacagtttgccctcctggccttcgagggtgaaaatcgggataaacgacagggtgatgatcagcaggctgataaacagcgccgggccgacctccaccgaggcctcggtaattattttccagcgtgtgtcgttgctgagcttctctcccgggtgctgatgctcccactcctccagccgcttatgggcgttctcaatcatcacgatggcggcatcgaccatcgcccccaccgcaatggcgatcccgcccagcgacatgatgttggcgttgagcccctggaaatgcatcatgataaaggcgaagcacaggccgagcggtagcgagataatcgccaccagcgccgagcgcacgtgccacaggaacagggcgcagactagggcgacgacgataaactcttccagcagcttgtagctgaggttgtcgatggcgcggtcgataagctggctgcggtcgtaggtggtgaccacttccaccccttccggcaggctgctttgcagcgacgccagcttctctttgaccgccgagatcacctcgcgggcgttcttgccggagcgcaagatcaccacgccgccggccacttcgccttcgccgttaagctcggcgattccgcggcgcatctccgggccgatctgcacccgcgcgacgtcgccaagatagaccggcacgccgttatccccggttttcagcacgatatttttgaagtcgtcgagcgtctgcaggtagccgctggcgcgcaccatatattcggcttccgccagttcgacggaagagccgcccgcctcctggttagaggcgtccagcgccgatttcacttcgccgagactgatgccgtactgggtcagcttcatcgggtcgacgacaatctgatactccttgaccacgccgcccaccgacgccacttccgagacgttagggatggttttcagctcatattttaagaaccagtcctgtagggagcgcagttcggcgaggtcgtgcttgccgctgcggtcgaccagcgcgtactcgaagacccaaccgacgccggtggcatccgggcccatttcggcgctgaccccggcgggaagtttgccctgcacctggttgagatactccagcacccgcgagcgcgcccagtaaggatcggtgccgtcttcaaaaatcacgtatacgtaggagtcgccgaattgcgagaagccgcgaaccgttctggcgccggggaccgacagcatggtggtggtcagcggccaggtgacctggttttcgacgatctgcggcgcctgccccggatagcgggttttgacgatcacctgtacgtcagagagatccggcagggcgtctaccggggtgtggatgatggtccaggttccccagatgctgagaaacagcgccgccatcatcaccaggaagcggttggccaccgagcggcggataatccattcaatcatggttccgttccttagtgcgcgtgggcggcagaggccgcggcatcaggggcctgcgcgcgcatgcgctccagcgcgccggcgatattggcctccgagtcgatcaggaacaggccgctggcgacgactttctcaccctcctgcagcccgctgcgaatggccgtgacgccattggactcatggaatacctgcacgattttcggcacgaagcggccctcgttatccacggtaatcactcgctgctcgctgccgctgtcgatcagcgctttggaggggatcagcagcatcggggcgctttcgctggtcagctgcaggtaggcgttcatccccggcttcagcgcttcatccgggttgttgacctgcaggcgcagctgcagggtgcgggtggcgctatcgacgctggggagaagggtccatttgctgatgcggaaggttttgcccggccaggcgggaacctgaatgctgaactgcgaggcgtctttaatcagccaggcgatggattccgggaccgccacgctgacccacaccgggtccatgccctgaattttcgccaccacgttatctttagcgatgttcattccggcgcgcagatcgaaggcggtgatcaccccgtcgatgggcgccttgagggtgaagcgggtctggatcttgcgcgtggctttcaggcggcggatatcgtcgtccggcattccggcgagacgtagacgctcgaggatcccctcgacctgcgtagcggtgcccccggtctcctgcaatagcagatattcgctctgcgcttccacccagtccgggatggtcagctcgagcagcggcgtgccttgtttcactttgtcgccgacggtcaacggatagactttattgataaagcccgccgcccgcgcctgcataatcacatactggtactcgttatagctgatgttggccgggaaggtctgggcgtagcgcagcggcccgcgggtaacggcggcggttttcaccccaagattctgggtctgcgtcgggtcgatacgcacccccggcgcaccggcggcagcactctcctcatcggcgtatttcggcaccagatccatatccataaacggcgatttacccggtttatcgaagcgggtgttcgggtacatcgggtcgtaccagaacagcactttacgctgctgctcggctgccggagcggcagcgtcgaccggcgttagtctggcgtacagcgccgcggtaagcgcgccgccaatcagcatgctgccgaggatcagcgccgtatttttcagtgtcagggatgccatgtgtcgtccattcagttgttgagggggcctaccgtcgccgggccgttattgggcgcggatatcctgtaacagcgacagattgccctgctgaacgaaggtgaagtccacgctgtcgccatccttcacattgttgagctgcgtctgcggggtgatggtgaagcgcatggtcatcggcggccagttcaccgccgggatggcctcgtgggcgatggtgatttttttgttatccatatcaatagctttaatgacgcctttgccgcggatgctttgcgcctgcgcggcggcgggctgctcgtgcatcaccataccggcgtgcggggcggcggcctgggcggcgaacaccgcgccagagagcagggtgaacagggcgattttagatagtgaattcatgttcgggactccttgggttattccatccagccgccgccgagagcggtgaacagggtgatttcatttgcctgacgggaatagttgagttccagcagggtttgtcgggtggtgaaaatatcgcgctgggcgctcaggacttcgatatagctgaccgcgccgtggcgatagagcgcagtggcgcgctgcagggtgatattcagcgaggcgagatagcgctcctgcgcggcaatttgatcggccaggctctggcgcagggccagcgcgtcggccacctctttaaaggcggactggattttttgttcatagttgaccacctgctgctgctggcggatctccgccagatcgaggctggcctgattacgcccggcgttgaaaatcggcagttcgattttgggaatgaagttccacatcgcgccgccagcgttaaacaggctggagagttcgctgctgctgccggagagcgagctggtcagggtgatcgacgggaagaaggccgcccgcgcggcgccgatgttggcgttggccgcttgcaggctgtgttcggcctctaaaatatccggccgctgcagcaggatcgctgaggagagcgatggcggcagggttacgccttgcaggtccacggcgctgctggcgctatcgtccggcagatgttgatagctgccgagcagcagttgcagggcgttattggcctgcgccagctggccctgacgtttggcgatatcggcgcgggtgctttcgatcatgctgcgcgcctgctccagcgccaggacggtggtgctcccggtcagcagctgtttttcaacgaaggcgtaagactgctgatagttctgcaaggtgtcgttggccacctgcagctgcgctgccgccagccgctggttgaagtagctttgtgaaacgttagcaatcaacaggatatgcaccgcgcgccgcgcctcttcgctggcgaagaagttctgtcggtcggcttcgctaaggtttttcaaccggccaaagaagtcgaggtcgtagctgaggtttaagccggcggcataatcgctgctggtggtggtgtcgcctttgagcttgccgccataggtggtgctgccgtcaccgttcaattgcgggtagcggtcggcgtcggtaacccgatattgcgcgcgagcctcctgcactttcagcgtcgccatccgcagatcgcggttgttggtcagcgcggtgctaatcaggcttttcacctgcgggtcgacgaaaaaggtgcgccagccggtctcctggtagcccgctgtcgcagtaaccagcttgttctggctgagagagaactgctgcggcaccggcgctgcggggcgctgatagtccggagcaagtgacagacagccggttaaggtaaatatcacgctgagggtaagtagctgtattgagcgcatggcggcagaagtttcgacgatttatccatggcggctactttacgtagcgggctctgttcagggcgtgacgggaaaatgacaaagctgtcattttcctgatatttcattgctatccggaggcgctcctctaaaattgaatacccgcacaaagcgcgcgtgaaggagcctgccgtgaagattttgattgtcgaagatgagaagaaaaccggagagtacctgaccaaagggctcaccgaggccggcttcgtcgtcgacctggccgataacggcctcaacggctatcacctggcgatgaccagcgattacgatctgctgatcctcgacatcatgctgccggatgtgaacggttgggatatcgtgcgcatgctgcgcgccgccgggaaaggcatgccgatcctgctgcttaccgcgttgggcaccattgagcatcgggtgaaggggctggagctgggcgctgacgactatctggtaaaaccgttcgcctttgcggagctgctggcgcgggtgcgtactctgctgcgccgcggggcggcggtcatcgtcgaaagccagtttcaggcggccgatctcagcgtcgatttggtcagccgcaaggtgacgcgcggtgccacccgcatcaccctgaccagtaaggaattcacgctgctggagttcttcctgcgtcatcagggcgaggtgctgccccgttcgttaattgcctcgcaggtgtgggatatgaacttcgacagcgacactaacgccattgacgtggcggtgaagcggctgcgcgccaaaattgataacgacttcgagccgaagctgatccagaccgtgcgcggcgtcggctatatgcttgaggtgccggatggccgctaagcgccccttttccctggccacccggctgaccttctttattagcctcgccaccatcattgctttctttgccttcacctggatcatgatccattcggtgaaggcccactttgaagagcgcgacgttcacgatctcagacagctcagcaccaccctggagacggtcctcgaccacgctgactatccgcaggcgcggcggctggagatcgtgaagaatatcattgcgggctacgccaacgtcttcatctgcctggacgatggccagggcaatattctgttccagtcgcccaacgggccggatctcagccatatgctgagtacgccggggctggcgatgcagctccgcgacgggaatgtgatttcatggaccgacccgcagccgcgggcaatggcgcacgataatcatccactggagacccgcgcctggcggttgatcatgctgccgctgggcaagcaggcggacggtaaaccggcgtaccacctgctgatggccttatccatcgattttcacctgcactatattaatgagctgaaagcgaagctgatctccgcggcgtcgataatcagcctgctgatcatcgccatcgtgctgtttgtggtctaccaggggcataagccgatccgccagatcagccgccagatccagaatattacctcgcgggatctcgatgtacgccttgacccgcaggcggtgcctgtcgagctggagcggctggcgctgtcgtttaaccatatgctggagcggatagaggatgtctttacccgccagtctaatttctccgccgatatcgcccacgaaatccgtacgccgattaccaacctggtcacgcaaaccgaaatcgccttaagccagagccgcagcccgcaggagctggaagaggtgctttactccaatctcgaagagttctcgcggatgtcgcggatggttagcgatatgctgttcctcgctcaggcggataataaccagctgatccctgagcaacaggcgctggatctggccgatgaagtgcataaggtgtttgagtttttcgaagcgtgggcggaagagaaggcggtggcgctgcgttttgtcggtagccattgccgggtgattggcgatccgctgatgctgcggcgggcaatcagcaacctgctgtcgaacgcgattcgctatacgccggccgggcaggcggtgaccatccagttgagcgaaagcgcggagacggtacgcctggtggtggagaaccccggtacgccgattgccgccgagcatctgccgcgcctgtttgaccgattctatcgcgtcgacccctcgcgccagcgcaaaggggagggcagcggcatcggcctggcgattgtgaaatcgattgtcggagcccaccacggcagcgtggcggcgcagtccgatctgcgctcgacgcggtttattgtggtgttgccgaaataggcgcaatccgcgagtgatagttgagtatgtggctttctgtcgctatattaaatgtacggaaaataaccgtacatgaagtttgcaacaggccggagataacgtatgcccgcacttaaaaagcagcgtatagatttgagattaaccgatgatgataagagcatcatcgaggaagctgcggcaatttcgaatcagacgattacccagtttgtggttgccagtgcctcagaacgtgctgcggaagtgattgagcagcaccgcagaatggtcctcaatgagcaatcatggagcctggtgatggaggcgattacccaaccgccagccccgaatgatcgactgaaacgtgcagcgaagcgtctacaaaccaggtaaggtagagctaatggagcagcaactgacgattgagatgattgccgatgcgttcagctacgatatcactggatttgattgcggcgaggaagcgctgaatacgtttttaaaagagcacctcaagcggcagcacgatggacaaatcttaaggggttatgcgctggtctccggggataccgttcccaggttgctgggttattacaccttatcggggagttgtttcgagcgaggcatgttgccgtctaaaactcagcaaaagaaaatcccgtatcaaaatgcgccaagcgtaaccctcgggcggctggccattgataaatctgttcaggggcagggctggggagagatgttggttgcccatgtgatgcgagtggtgtggggagcgtctaaagccgttggcatctacggattgtttgttgaagcccttaatgagaaagctaaagcattctatcttcgtctggggtttatacagctcgtggatgaaaatagtaacttactgttttatccgaccaaatcgattgaacagctctttactgacgatgagtcataaaagaaaccgggcagcgccaggcggctgcccgcagtatcgcgactctcttactcttcgaagtaccagtagccctgattaatcagccgcgtcagttcgctcacgaacgccggattctgcaggccgctgccgagctcttcctggcctaatgaggtatagcgacacagcgcatccagcgcttcggcatcggtggtgtcgagttgttcgctatgcacgaagaagctgtcgccgatatgcagaacgcgcaggccgctcaggcgggaaagcttttcaccacccagcagcgcatcgaccacttcctcttcttcatacggtggttccgccggcgcaatatccagctcgtgacgcggggtggtgacgaaactgccgaaccactgcttgaagtcttccggctggcgaatcatatcgatcatcatggtgcgcagacgttcgagttcatactcttcaacccggcccggatgctcgcggcaggtgaggtccggatcgctgtagtgctcgccgccgagatcgttctccagcacatagtcggcgaagctgctgatcaggtcgcggccgtttggcccgcggaagccgacggagtagttcagggcggtttcgtgggttatgccgtcgtgcgggaatcccggtggaatatagaggatgtcgcctggctgcagatcttcatcaatgatcggtgggaacggatcgacgtgcagcagtgccggatgcggacagaactgacgcatcggcagcttgtcacccacgcgccagcggcggctgcccatgccctgaataataaagacgtcatactgatcgatatgcgggccgacaccgccgccggggacggagaaggagatcatcaggtcgtccaggcgccagtccggcagtacgcggaacggacgcaccagctcggcggcaggcatatgccagtggtttaccgcctgggccagcagggaccaaccggtttcgcccagcccgtcgaaatgttcaaaaggaccattgctggcctgccatttgccgtttttcaggctgaccagccggctgtcgacttccggctccatggctaatccggccagctcgtccggagtaatcgggtcgacgaagtccggaaacgcgttttttaataccaccggctgtttctgccagtatttttctaaaaactcgggccagttaatgttgagttgataagccatcgattattaccagtaagaagaaacgggcctgattatagaaatgagggccgggcgggcgcattgtcgtgggtcaagagtggtgcttaattcaccatcggcgcgataatggcgttgggtaagagagaaaatcacattttcgccaaaaaccgatcttagcgtaaattgcgctgcaggccgcatgagcactgggattgcgcctttaatggtaagaagatgaattagcgaaaagttcaaataatgagcggtcgataagatttttctattttaacgcttgctacttccggcgaactccctataatgcgctcccactgacacggcggatgtgaatcacttcacacaaacagccggttcggttgcagagaaaaatcctgaaaaacgggttgactctgaaagaggaaagcgtaatatacgccacctcgcgacagggcgctaaaacgcgtcgcaactgctctttaacaatttatcagacaatctgtgtgggcactcaaagtgacatggattcttaacgtcctcggacgaaaaatgaataccaagtctcaagagtgaacacgtaattcattacgaagtttaattctttgagcatcaaacttaaattgaagagtttgatcatggctcagattgaacgctggcggcaggcctaacacatgcaagtcgagcggtagcacagagagcttgctctcgggtgacgagcggcggacgggtgagtaatgtctgggaaactgcctgatggagggggataactactggaaacggtagctaataccgcataacgtcgcaagaccaaagtgggggaccttcgggcctcatgccatcagatgtgcccagatgggattagctagtaggtggggtaacggctcacctaggcgacgatccctagctggtctgagaggatgaccagccacactggaactgagacacggtccagactcctacgggaggcagcagtggggaatattgcacaatgggcgcaagcctgatgcagccatgccgcgtgtgtgaagaaggccttcgggttgtaaagcactttcagcggggaggaaggcgttaaggttaataacctcatcgattgacgttacccgcagaagaagcaccggctaactccgtgccagcagccgcggtaatacggagggtgcaagcgttaatcggaattactgggcgtaaagcgcacgcaggcggtctgtcaagtcggatgtgaaatccccgggctcaacctgggaactgcattcgaaactggcaggctagagtcttgtagaggggggtagaattccaggtgtagcggtgaaatgcgtagagatctggaggaataccggtggcgaaggcggccccctggacaaagactgacgctcaggtgcgaaagcgtggggagcaaacaggattagataccctggtagtccacgccgtaaacgatgtcgatttggaggttgtgcccttgaggcgtggcttccggagctaacgcgttaaatcgaccgcctggggagtacggccgcaaggttaaaactcaaatgaattgacgggggcccgcacaagcggtggagcatgtggtttaattcgatgcaacgcgaagaaccttacctggtcttgacatccacagaacttagcagagatgctttggtgccttcgggaactgtgagacaggtgctgcatggctgtcgtcagctcgtgttgtgaaatgttgggttaagtcccgcaacgagcgcaacccttatcctttgttgccagcggtccggccgggaactcaaaggagactgccagtgataaactggaggaaggtggggatgacgtcaagtcatcatggcccttacgaccagggctacacacgtgctacaatggcatatacaaagagaagcgacctcgcgagagcaagcggacctcataaagtatgtcgtagtccggattggagtctgcaactcgactccatgaagtcggaatcgctagtaatcgtagatcagaatgctacggtgaatacgttcccgggccttgtacacaccgcccgtcacaccatgggagtgggttgcaaaagaagtaggtagcttaaccttcgggagggcgcttaccactttgtgattcatgactggggtgaagtcgtaacaaggtaaccgtaggggaacctgcggttggatcacctccttaccttaaagaacctgcctttgtagtgctcacacagattgtctgatgaaagtaaagaagcaaggcgtcttgcgattgagacttcagtgtccccttcgtctagaggcccaggacaccgccctttcacggcggtaacaggggttcgaatcccctaggggacgccacttgctggttcgtgagtgaaagacgcgtgccgaactatctcaaaactcatcttcgggtgatgtttgagatatttgctctttaaaaatctggatcaagctgaaaattgaaacgacacactgtttaagtgtgttcgagtctctcaaattttcgcaatcagaagtgaaacatcttcgggttgtgaggttaagcgactaagcgtacacggtggatgccctggcagtcagaggcgatgaaggacgtgctaatctgcgaaaagcgtcggtaaggtgatatgaaccgttataaccggcgatgtccgaatggggaaacccagtgcaattcgttgcactatcgttaactgaatacataggttaacgaggcgaaccgggggaactgaaacatctaagtaccccgaggaaaagaaatcaaccgagattcccccagtagcggcgagcgaacggggagcagcccagagtctgaatcagcttgtgtgttagtggaacggtctggaaagtccgacggtacagggtgatagtcccgtacaccaaaatgcacaggttgtgaactcgaagagtagggcgggacacgtggtatcctgtctgaatatggggggaccatcctccaaggctaaatactcctgactgaccgatagtgaaccagtaccgtgagggaaaggcgaaaagaaccccggcgaggggagtgaaaaagaacctgaaaccgtgtacgtacaagcagtgggagcaccttcgggtgtgactgcgtaccttttgtataatgggtcagcgacttatattctgtagcaaggttaaccgtataggggagccgcagggaaaccgagtcttaactgggcgttaagttgcagggtatagacccgaaacccggtgatctagccatgggcaggttgaaggttgggtaacactaactggaggaccgaaccgactaatgttgaaaaattagcggatgacttgtggctgggggtgaaaggccaatcaaaccgggagatagctggttctccccgaaagctatttaggtagcgcctcgtgaactcatcttcgggggtagagcactgtttcggctagggggtcatcccgacttaccaacccgatgcaaactacgaataccgaagaatgttatcacgggagacacacggcgggtgctaacgtccgtcgtgaagagggaaacaacccagaccgccagctaaggtcccaaagtcatggttaagtgggaaacgatgtgggaaggcacagacagccaggatgttggcttagaagcagccatcatttaaagaaagcgtaatagctcactggtcgagtcggcctgcgcggaagatgtaacggggctaaaccatgcaccgaagctgcggcagcgacactatgtgttgttgggtaggggagcgttctgtaagcctgcgaaggtgtgctgtgaggcatgctggaggtatcagaagtgcgaatgctgacataagtaacgataaagcgggtgaaaagcccgctcgccggaagaccaagggttcctgtccaacgttaatcggggcagggtgagtcgacccctaaggcgaggccgaaaggcgtagtcgatgggaaacaggttaatattcctgtacttggtgttactgcgaaggggggacggagaaggctatgttagccgggcgacggttgtcccggtttaagcatgtaggctgattgtccaggcaaatccggataatcaaggctgaggtgtgatgacgaggcactacggtgctgaagtaacaaatgccctgcttccaggaaaagcctctaagcatcaggtaacattaaatcgtaccccaaaccgacacaggtggtcaggtagagaataccaaggcgcttgagagaactcgggtgaaggaactaggcaaaatggtgccgtaacttcgggagaaggcacgctggtgtgtaggtgaagtccctgcggatggagctgagaccagtcgaagataccagctggctgcaactgtttattaaaaacacagcactgtgcaaacacgaaagtggacgtatacggtgtgacgcctgcccggtgccggaaggttaattgatggggttatccgtaaggagaagctcttgatcgaagccccggtaaacggcggccgtaactataacggtcctaaggtagcgaaattccttgtcgggtaagttccgacctgcacgaatggcgtaatgatggccaggctgtctccacccgagactcagtgaaattgaactcgctgtgaagatgcagtgtacccgcggcaagacggaaagaccccgtgaacctttactatagcttgacactgaacattgagccttgatgtgtaggataggtgggaggctttgaagcgtggacgccagtctgcgtggagccaaccttgaaataccaccctttaatgtttgatgttctaacgttggcccctgaccggggttgcggacagtgtctggtgggtagtttgactggggcggtctcctcccaaagcgtaacggaggagcacgaaggttagctaatcctggtcggacatcaggaggttagtgcaatggcataagctagcttgactgcgagcgtgacggcgcgagcaggtgcgaaagcaggtcatagtgatccggtggttctgaatggaagggccatcgctcaacggataaaaggtactccggggataacaggctgataccgcccaagagttcatatcgacggcggtgtttggcacctcgatgtcggctcatcacatcctggggctgaagtaggtcccaagggtatggctgttcgccatttaaagtggtacgcgagctgggtttagaacgtcgtgagacagttcggtccctatctgccgtgggcgctggagaattgaggggggctgctcctagtacgagaggaccggagtggacgcatcactggtgttcgggttgtcatgccaatggcactgcccggtagctaaatgcggaagagataagtgctgaaagcatctaagcacgaaacttgccccgagatgagttctccctgagactttaagtctcctgaaggaacgttgaagacgacgacgttgataggccgggtgtgtaagcgcagcgatgcgttgagctaaccggtactaatgaaccgtgaggcttaaccttacaacgccgaagatgttttggcggatttgagagaattttcagctctgattcagattaatcgatacgttggtgaaacgtgttgataaaacagaatttgcctggcggcactagcgcggtggtcccacctgaccccatgccgaactcagaagtgaaacgccgtagcgccgatggtagtgtggggtctccccatgtgagagtagggaactgccaggcatcaaataaagcagaaagcccggtcgaaagaccgggctttttgtttttgcgtttaaaaagaaccccgtcccgaaaggtacggggttttttgctgtgtggggtatatctcccccggtggcgctgcgcttaccggggctacaaaagcgtagcccggacaaagtgcgcagcaccgcctttattgcttcgcaaaatagcgtgacgaatgcttgtggcatggtcaaccggatagtgaatttaccggatgatacaagtcggaaaataattatcagcagctacgattaatattatttctttatttcagcgccattatattgtgctccggtaaaataatgatgcggcctcttcctcccacaaaataacgcgtttacgcttcagaaaaaatatttccgtgactggatacttcgcttccggatgtattgtggcgaacggtatgcttcttccctgtttttgtctaaatgagctttatcattaacactttgttaacttgatctggtttatatggcagcaaatttgatatacaaagggggatgattgcctgtatggatgctgcccgaaataccttgcgaaacatagactggttctcggctggcaaatgagaatagaaatgaaaatcctgcttaactggtcgccattgcgccagctcttcacttacattcaggagcgctttacctttctggtgctgctctgctggccagcgattatctggttgttctgccgggtcggcgtgtggctcaccgataacgtttatgaactgctgggaaaatcaccagcccagtccttcaccgtgtatctgcagccgtttatgacccccggcacgctgctgcgcatctccatcagctgggtggtgttgctgttcattctcttcagtatggcgatggccttcacctggggtttacgtcgctttatgaatcgccataaataaaccattcggccgccgtaagtcgacggcccttcttaagcctttatgccatctcaccaatagtcttacgaaaacgcagcaacgcgatagtaaagaacactccgccgatagccagcaaggttaagaactgcggccagacgatggcgaagctggcgcctcgatacaatatcgcctgcgccaggctgacgaagtgggtggtcggcatggtcaacataatatcctgtaccagctgcggcatactttctcgcggcgtggatccgccggagagcatctgcagcggcagtaagaccaggatcatcagcagccccagctgcggcatcgagcgggcgagggtgcccataaaaatgccgatcgaggtcgtggcgaacaggctgagcgccacccccagcataaacaggggaatcgacccttcaatgggcacctgcaaaatcccctgtaccatcagtatcagtgacaacccggagaccaccagcaccaccaggcccatcgaccagatcttggccagcataatttcaaacggcgtgatcggcatcaccagcagatgctcaatggtgccatgttcccgctcgcggatcagcgccgaaccggtgaggacaatggccagcatggtgatattgttgatgatcgccatcaccgcgccaaagcgctcctgctcaaggttaggattaaaacgcatcctgaccgccagctctaccggcagcacgctgttatcccgatagcgggcgataaaactgtttacttcgccggtgataatattctggatgtaaccgttgccggtaaaggcctgactcatgcgcgtggcgtcgacgttgacctggatttccggctgccgatcggccagtacatcgcgctggaagttaggcgggatgttgatggcgaacgtgtagcgcccggcatccagcccggcgtccatctcatcagcggtgatcagctccggctcaagaaaccagggacggtaaaaagcgttaataatgcgtgaggagagctgggatttatccatatcagcaaccgcgatcggcgccaggtgcagcgaaccgggcatcaccgtggccgaggagtacaccgacacggtaaacgcaaacacgatcagcgccagcatagctttatcaccgagcaggctgcgcagttctttgacgccaagattataaatattgcgtaatccgcgcatcatccctcctgtttcttcagcagcagcacgctcaacccgagcaccagcggcaccgcaatcagtagcggaatgaatgagccccacaaatcgctaatattcagcgctttcgaaaaggtcccgcgggcgatagtcaggaagtggctggtcgggtagatttgcccaatccagcgcccgggaccttccagcgaggccaccggatcgatcattccggaaaactgggttgccgggatcagcgtaataatcgcggtaccgaaaatagcggcgatttggctcttcataaaggttgagatcagcagccccagaccagtggcgatggtgacatacagcagcgccgccagggtcagcgtcaggaaactccccttatgcgcgacgccaaagacaaagaccgacagcgcgcacagcaggaagaagttaaacatccccagtacgatgtaaggcagctgcttgccgagcaggaattcgctgcgggtggttggcgtcacgtacaagttgataatcgatccgagctctttctcacgcactacgctcagggcgctgagcatcgccgggatcatcatcagcagcagcgggatcaccgccgggacgatggccggcaggctcttcacatctggattgtagcgatagcgggtctcgatggagatgagcgaggtatcgcgccgcgggctgctctggcggccggccatctcctgcagccaggccagatgcatcgcctgtacgtagccgcgcacggtttccgcgcggttgggcatcgcgccgtccacccacacgccgatttgcaccggcgtgccgcgggcgatatcgcggccaaagttcggcgggatctctatcgccaccgccagctcgccgtcgcgcatccggcggtccagttcgtcatagctgtgcagcggcgcctgttcgataaagtagcgtgagccagcgagattctgcgaccagccctggctgctgagggtttgatcgcggtcgaggacggcaaagcgcagatcctcaacgtccatgctgatcccataccccatgataaacatcaggatcaccgtccccagcagcgccagcgtcgatcgtaccggatcgcggcgcagctccagcgcctcgcggcggctatagctaaacagccggcgaagactgaaggcctgccgtggagtcgtgtgtcgggaatacgatgccacagcagacgtgggttcttctggtactggagaggacggctgggcctctttaagccaggcgataaacgcctcttccaggctgtttgaaccgcgctgctcgaccagcgcctgcggcgtatcgctggccagcactttgccggcgtgcatcagggagatacgatcgcagcgttccgcctcattcataaagtgggtggagataaaaatggtcacttgatcctgccgcgcgaggtctaccatcagctgccagaacatatcccgcgccaccgggtcgacgccggaggtcggctcgtcgaggatcagcatctccgggcgatggatgaccgccaccgctaacgacaggcgctgacggatccccagcggcagatcggcgggaagcgcgtcttcaacctcggtcagcataaagcgctcgcacatttccgccacccggccggggatttcgccgtccggaatatggaacaggcgggcgtgcagctcgaggttttgccggacggtcagttcgctatagagcgagaaggcctgcgacatatagcccacccgctggcgggtggcgatatccttcgggtcgaccggctggccgaacagccaggcttcaccttcgctggcgggcagcaggccggtgagcatcttcatggtggtggatttgccgcagccgttggagccgaggaagccgaagatttcaccgcgggcgatgcggaaattaacgtggtcgacggcaacaaagttgccaaagcgcatggtcaggccgcgcgcttcgatggcgatctcttcctcacggctgtcgcgcggtgggataactaccgccctatgcgcctgacgctgtgcttctggcagcagggcgataaacgcctgctccagggtctggctgccggtctgggctttgagctctgcggcgctgccggtcgccagcacctcgccggcgttcatcgccaccagccagtcaaatcgctcggcctcttccatgtaggcggtggccaccagcacgctcatcgccggctggcgctggcgaatactgtcgataagctcccagaattgcgcccgggagaggggatcgacgccagtggtcggttcatcaaggatcagcagctgcggatcgtggatcagcgcgcagcacaggccgagcttttgcttcatccctccggagagttttccggcggggcgatcgcgaaacggcgccagcccggtactctgcagcagctcgttgatgcgcagttcgcgctcggctttatcgtggccgaacaggcgggcgaagaagtcgacgttttcatacaccgagagagtgtgatagaggtttttccccagcccctgcggcatccacgcgattttcggacacacctcgcggcggtgatgcacatcgcgcatatcgccgccaagcaccatcacgttcccctgctcgatggtccgcgccccggcgatcagcgaaagcaggctcgatttgccgacgccgtccgggccaatcaggccaaccatacgccgtgccgggatcgccagactgatatcgcgcagcgcgatggtggcgccaaactgctgaccaacatgttccagcagggcgacggggggcgaggtatcctgcggcgttagtttcattgcggcaacctcaccgccagggcttcaggccagggttgttgtttatccagccgtacgtaagccataccgggcaggccggttttgacatactccaggtgttgcgccagcagctccggcgggatacgcgctttgacgcggaacattagcttcaggcgctcgtcgctggtctcgaccgttttcggcgtgaactgggcgacgctggcgacaaagctgatattggccgggatcaccagatccggcgcggcatcaaggaccaagcgcgcttcgctgccgagcgccagcagacctgcctgttcggtgggcagaaaaaaggtcatatagacatcggcgagatcgaccatgttcagtacccggccaccggcggccaggacttcgcctggctcagcgacgcgatactgaatgcggccatcgcggggggctttcagctcgctatcgtcaatatcggcgaggatccgccgctcggtcgcctgggcggcttcgacgcgggtttgcgcctgaataatgctggtgcgggcagcttcgatggcggcgcgggcggcggagacctgggctttcgccgattccagcgccgcgcgggcgctctctgcggccgcgcgatcgtcatccagctgctgggcggagacggcgccacgctgggagagggtgttggagcgaacatggcgtttcgccgtggaatccagctccgcctggcgctgcttcactaccgcttcgctggcacgcatttcactttgtcgctgatcgagcaaggctctggcggccaggaccgcgctttccgcttccttgatttgcgcggcggcttcaagacgctgctcgttcagtacccgggtatccattctcgccagcacctctccctggtgcacgaactgaccctctttgaccagaatggtgtcgatacgcccggcgattttactggcaatatcaacttcggtggcttcgattcggccgttgctgctggcaaaccccgccgggagtcccggcgggcgcagcagccaccatgcggcggcggcgagcaccaccagtaagccgacaaaataccctgcccaacgtttctttattttgtccatacgcgactcgcttgattccctgtgctgagtggtgcgcgtgtttcctccggcgggcggagcgtccttcttgcgaaggacgaaaaagtggagggagggccgctgacgccgcgctctgccgcgccgatgcgcagccgctcgctgggctacttatgtggtcatcatcagcgatcctggccttaatgaaacacgcatagtgagagctaccgttaacgcgatagtaacagccggggcgatattgtccatacgaaagacagggtcttgtcggcgtgttaacaaaattatccgcacagggagtatttcaccatctcagaacagcacaggcagacccagcccacgcttcacctcatgcagcgtctgctgtgtgaggtggtgggcgcgttcgctgccctggcgcagcagctccagcagcatccctttatcctgaataaaagtggccctgcgttcgcggatcggcgccagtagcgtctgcaggcaggtttccagctcattcttacactggcgatcgcccagcccgccgcgctgatagtgggctttcatctctgccacccgcaccttatcgctgtggaatgcatcgagataggtaaacaccacgttgccctcgacatgccccggatcgctgactctcaggtgcgtcgggtcggtatacatcgcgctgaccgcgtggtggatctcctcctctgtggccgataacgtcagcgtattgcccagcgatttcgacattttggcgttgccatcgacgcccggcaggcgactcacttcgctgagtagcgccttgcagtggcgcagcaccggctcgccggtgaggctattcatcttgtggacgatctcgttggtctgctcaatcatcggtagctgatcgtcgcccaccggcaccagttcggccttgaacgcggtgatatcggccgcctggctaatcggataggcaagaaaacccaccggtagcgagcgggcgaatcccttctgggcaatctcatttttgaccgtcggattacgttctacgcgggcgacggtgacgatattcatatacagcgcgctgagctccgccagcgccggcagggcggactgcaggcaaatagtggtgagcctggggtcgatgccgacggccagataatcggccatgacttcgaggatatggtggctgattttttgcggattgctgccgttgtccgtgagcccttgcaggtcggcgatcaggataaattgctggtggttatgctgcagcgcgacgcgctggcgcagcgagccgacgtagtggccaagatgaagttggccggtcgggcggtcgccggtgaggatggtttgtggatggttcatcagggactccttatcagactgttcagccgaaagacgtcctgaaaacaccaaagccgccttccggcggctttgaaaatggaaacgtgtatcgtgccgcctgttatgcaggcagccaccaacggcggggataggtaacgataacgtttctgttcatagggagtatcctgccacggaaggggctggaggcgcaatcaaaaatcacatacttttcctgatgttatttatgtgattgtttttcggtaaataacgaagcgggaaaaatatattttctctgcgacccgatcattattctggaacaacaaactatgttgcattttttttgtgaaaaagctcacgccacaggattatagtattattatccatatttatagctgaatattacctgtctgctgttacagcttgtgtttattctcttctaaattattaacattattacaatttctatctatttttccgctttgcgtcatacccctgtctgactacaacgtattgaggctaattattatgcataaacgtctggtcgttaatattttttcatcattgctgttgggggctgcgcttatttccgcgccggtatatgcggcggaaaaaaccgtagtcaatatttcaaaagtggacggcatgccatggtttaaccggatgggtgaaggggtagtccaggccgggaaagagtttaacctcaacgcctcccaggtagggccgtccagcaccgatgcgccgcagcaggtgaaaattattgaggacctgattgcacgtaaagtggatgccatcactatcgtgcctaacgatgccaacgtgctggagccggtattcaaaaaagcccgtgacgccggcatcgtggtgctgaccaacgaatcgcccgggcagccgagcgccaactgggatgtggagatcatcgataacgagaagttcgctgctgaatacgtggagcatatggccaagcggatggggggcaaaggcggctacgttatctatgtcggtagccttacggtaccgcagcacaacctgtgggccgatctgctggtgaaataccaaaaagaacattacccggacatgcatgaagtcacccgccgaatgccggtggcggaaagtgttgatgattcccgccgtaccacgctcgatctgatgaaaacttacccggatctgaaagcggtggtctcttttggttcgaatggcccgattggcgcggggcgcgcggtgaaagagaagcgtgcgaaaaataaagtcgcggtctacgggatgatgatcccctcgcaggcggcttctcttattaagagcggcgatattaccgaagggatcacctacgatccggcgacagccggctatgccctcgcggccgtcgccagcaccctgctgaacggcaaaaccattgagccgggatttgaactgaaagagctcggtaaagcggaagtcgatagcgacaagcatattatccgcttccataaagtgctgctggtaaataaagacaatattgattcgctctactaatccaccttccggggcgcctgccgccccggcttaaccagccaggggatgctatggaacctttcctttcccttcgacacgtcagcaaaaccttccacgccaaccgcgcgctcaatgatatcagcatcgactttatgcccggagaagtgcactgcctggccgggcagaacggttgcgggaagtcgacgttgatcaaaattatctctggcgtctatcgcccggatgtgggcgcagcgatgacgctgggcggcaagacgtggcccaaactgacgccagcggcctctgtcgcccatgggatccaggtgatttatcaggatctgtcgctgtttcccaatctcagcgtgtgggagaacattgctataaaccactatcatcgcggcgtactggtgaggcgcagcgaactgcgacgcagtgcggagcaggcgatgcgcagtattaacgtctcgctgccgctggatgccgccgtggaatcgctctccatcgctcgctgtcagctggtggctatctgccgcgcgctggcgcaggatgcccggcttatcattatggatgaacccacggcctcattgacccatcaggaagtggagggactattgcatgtggtgcgccagctgcgtgagagggggatctgcatcgtcttcgtaagccaccgtctggaagaggtcatggccgtatcggaccgcatcagcgtgctgaaggatggcaatctggtcggcaccttgccggcggcagaggtaaccacccgccggctcggttttctgatgacgggccaggagtttgactatcaggtgcgcgatctgtggcaggggcagggcagtacgccggtgctggaggtgcgcaatctcagccgcaaaggggaatatcataacgtctccctgaaggtcgaagccggagaagtggtgtcgatagtcggcctgttgggcgccgggcgaacagagctgtgcctgagccttttcggcatgacccgccctgacagcggcgagatcctgataaatggccagccggtgcggttgcgtagcaatcaggacgctatccgccacggtatcggctatgtctccgaggaccgtatgtcgcgcggcctggtgatgagtcagtcgattgaaaacaacattatcagcaccgtgtttcataaagtgaaaggcgcttgcggactattgagtgatagtaaagctcagcagctggtcgcaagaatggtcaacgcgttgaccattaaggcgccggatacgcatctgccggtgaataccctctccggtggtaatgcccagcgcgtttctatcgccaaatggctggcgatctctcctaagctgctgatcctcgatagcccaaccgtgggggtggatatcgcaaacaaagccgggatctatcatatcatcagcgatttggctgcccatggtatcgccgtgctgatgatttgcgacgagattgaagaggcgtggtaccagagtcatcgcatcctggtgatgaagcagggcgagttgacccatagcttcctgccggacagcagtacccagcagcagatagcggaggtggtcaatggctaatctgttgaaacgacatgaattctggttaggcatgttcattattgcgctgtgcctgctgctgggctggcgcagtgaggaatttttcactttcggcaatctttacgacctcgctaataactatgcgatgctgaccattctcgcctgtggtctgttcgtggtgctgatcgccggcgggattgatatctccttcccggctatgaccattatcgcccagtacggcatggtggtgatgctgcaaaaagtaggcggcaacttcgcggtggcttttgtgcttgccggcggcatcggcgtgctgctggggctggtgaacgcgctgttggttaatcgtctgcgggtcccctcgatcattatcaccatttctacgctcaacattttctacggtttgctgctgtggttaagcaaaggtgtctggctctacgacttccctccgtggtttgaaaagggggttatgctgttcaaatataccgatgccgatggttacgattacggcctggggctgccgctgctgacgatgatcgtcgtggtgctgttgaccgcgtttatcatgaatttcactaccgttggccgcaagatctatgccatgggcggcaaccgggaatccgccagccgcgtcggcttcagcgtgctccgcctgcagctgttcgtttatggctatatggggctaatgtcgggggccgcaggtgtcgtgcaggcgtggacagtgatgaccgttgcgccggattcactgctgggctatgagctgacggtgctggcggcggtggtgctgggcggcaccagcctgattggcgggcgcggaactctcaccggtacgctgctgggggtgattttactggcggtgatgcagaacggcctgaacctgctaggggtctcctcctactggcagaccctgatcactggggcgatcatcgtcgtcagcatcagcgtaacggcatggagccagcatcagaaccggagcttgttatgaaaaaatcgtggcgcaacaacgttgagttttacctgatcggcctgctgctgctgatggttatcgcctttagcatcgccatgccaaacatcttctggtctgtcagcaatttccagtcgattgcctcgcaaatgccggtgctggggatcctggcgctggcgatggccatgactatgctttgcggcggcattaatttgtcaattatcgcgacggctaacgcctgctcgctggtgatggcctgggtggcgacgagctatccgcctgggggcgctaccgcgctggcgacgctgctggccggcggaggggcggcgatgatcattggcctgtgcaacgggatattgatcgccgggatccgcgtttcgccgatcctggctacccttggcatgatgaccctgctcaaagggataaatattctgatcaccggcggcagcgccatcgctaactatccgcagtgggtgctgtggctgaatcacgcccagtggttcggtattccgctgccaatgtggctttttgcggtggtggcggccgggctgtgggtgctgctggagaaaagcccgctgggtcgggcgatcatgttgatcggatccaacgaacgggcgacccattattccgggatcaatacccggcgggtgttgatgtgggtatatgtcatctcggccctgctctgcgcggtggctgcgtttctgatgatgtcgaagctgaactcagccaaagcatcttatggggaatcgtatttgctggtgtcgatcctcgcggcggtgcttggcggcgtgaatccggatggcggtagcgggcgcatcgttgggatggtgctcgcgctgttcctgctgcagattattgagagtgggttcaatatcctcggtatcagcccctatctgacgatggcgctgtggggcgtattgctgctgtgctttatccaggcgcgaggcatgctgggactggagagagccgggtaaatgacccgtcctcgggggcgaagacgggatagccagttattcgctacgcaaatgcaccgccaggccgctttgccctggcgccagctccgggcgcagcgtcagcgacgggatcagataatcgccatgattctggcggcggaatggaatgggctcggtttgccacagcgtgtccagccgctcggccagggcggcgcactgatcggcgaactgcccggcatcggttttatccgtgcggtagaacaccagcggcggaagcacctcaaagccggggtagaacagcataccgtgctgaatggggaacaggatgtcgtcgatggggccattgatcccgcgcggtgaatagtgttccgcccagccgccggcggtgacgatcagcatcgcccgcttgccgacgaaagtgccttccccgtagcgatccccccagtggcggtcgctgtgctcgccgacgccataggcaaagccccaggcgtacaccctgtcgatccagcccttcatgatggcgggcatcgagaaccaccatagcgggaactggaaaatcaccgtatcggcccacagcagcttttcctgctcggctgcgatatccgcactttgggtgccctgggcaaaggcctgtttggaatcgagggtcggccgccagaactcgccgaccggcggggcgccgctgtcgtcggcgtcatacccggccttccagcgcatggcgtagagatcggagacttgcacttcatgcccggcctgctgcagatggcggacggcgaaatttttcagcgcgccattgagcgagcgcggttccggatgggcgtaaatcagcagtactttcataatatcacctctggcgtatggagagctgcagagtaggaaagctgacgctatagtagaaattaattacttaaattcccggtatagtcgtgattaatttacagcgtctggatctcaatctgttgcgcaccctggatgtgctgcttagcgaaaacaacgttacccgggcggcgcagcggctgaatctgtcgcagccctcggtaagtattcagctcgccaggctgcgggagattttcgccgatccgctgctgatgccgggcccgcgcggcatgcagcccaccgcccgcgccgatgagcttcgccagccgctgcgcgccgcattagccgcgctggagcaggcggtggcgccggtcagcccttttgatccggccacggcggcggagacctggcgggtggcggcgacggactatatggcctcggcgatcctcctgccgatgctggctgggttacgccaggcctctcccggcagtcggctggcggtattcgaactgcagccggcgcggctggagcagcaggcggccagcgatacagtagatcttttctttcatacccgcgagggcgcgccgccggggctgcatcagcgcctgctgtttcgcgaacgctacgtgctggctggccgggcggaacattcggcgctgcggcctgggcttagcctggaaacgttctgtcagctggagcacgtgatcgtctccccggacgggggcggcttcagcgcggcgaccgatatcgcgctggcgaacctcggactgatgcggcgggttgtcctttccgtgccacatttcctgtttatgctggagaccctgcgcaatagcgatctggtggcggtcctgccggagcggctggtgcgcgggcagagcgggctggtggtcgtcgagccgccgctggcggtcgccggctttgagatgctgatgctgtggcacgagcgctggcaccgcgacccggcgcatcaatggctgcgtcagttcattgtgaattcactggaggaacagacatgctgagtggactgaatcacctgaccctggcagtcagccagctggcgccgagcgtggcgttttatcagcagctgctgggcatgacgctgcatgcccgctgggacagcggggcttatctctcctgcggcgatttgtggctgtgcctgtcgctggatccgcagcggcgcgttactccgccggaagagagcgactacacccattatgcgtttagtattagcgaagccgattttgctagcttcgccgcccgccttgaggctgccggcgtggcggtctggaagctgaaccgtagcgaaggtgcctcgcactatttcctcgatcccgatggccataagctggagctgcacgtcggcagtctcgcccagcggctggccgcctgccgcgagcagccgtataaggggatggtgttttttgaacagtgaagctgctacgcagacgttagatcacccgtagccccggtaagcgcagcgccaccggggagaacaggttaaattcactccatcgccaccttcaccgcttctcccagcttcaccatcaccgctttatgtttttcggtcggcggcagggcgcagttgatcctgacgcagttgcgatacttgcccgctgccgaaaacagcgagcccggcgcgacctggatcttcagccggcacagctgcttggcgacgcagaccatatctacctgctccgggagctcaacccacagcataaaaccgcccttcggccgggtgacgcagatcccgcaggggaaaaattcccgcagccagcaggtgtagatctcgatattgcgctgatagatctgccgcatccgccgcacgtggcggtggtagtggccttcgcgaataaaattgcaggccgccagctgagtggaggggacgttggtcccgctggcggcgtacttcatctgtagcagcttgtcgtagtagcgcccgggggcgatccagccgatacgcagcccgggggcgatggttttggtaaaggagctgcagagcatcacccggccgtcgatatcccaggagtggatcgtgcgcgggcgcgggtattcggtggccagctcgccgtaaatatcatcctcgaaaataacgatatcgtagcgttgggcaaggttcagcaccgcgcgcttgcgggcgtccggcatgataaagcccagcgggttattgcagtttggcacgaggatcacccctttgatcggccactgatccagcgccagctccagggcctcgatgctgatcccggtttccggatcggtggggatctcaatcgtctttaatcccagcccgcgcagcatctgcatggtgccgtagtagcagggggattccacggcgatgatgtcccctggctggcacaccgacagcagggccagcgacagcgcgctgtggcagccgctggtgagcaccagatcgtcggcagttaccaccgatccgccgtcgagcatcaggcgggcgatctgctcccgtagctcgcgacgcccggccagttcgtcatagttcaacacctcagtgaggttgtgctggatagcccggctcagttcacgccagatgggcttcaggcttggctgcgtcacgtccggcgagccgccgccgaaggggatgatcgatttatcgtagcgggcgtcaagcatggtcagcacctgatcccactgggttatctccaccgggcgctggaccggacgcgacatcggcggcaccggcggctgggctttgcgcggggcgacgaaatagcccgatcgcggctgcggcacaatcatctgctgctgctcaagcagctgataggcctgctggacggtgctgatgctgacgccgtgctcctggctcaggctgcgcaccgacggcagcttttcgccatggcgatacaggccctgttcgatgcgttcggccagcagcgtagcgagatgttggtagcgggtcatgctgtatccttaattgccgccatacagatggaataaccagtacagatgggcgtaaaaattgggctctggtgtacgttttagctaatctgtatgttaaagaaaagcgttttgtgaatctgtattccttacccccaaatccgtgaagataaagcctctggcaaggtgaggaggtagaggatggaatttcacgagaacagggcaagacagccatttatcggtttcgtactgctggtgcggtttatcaaaaaatggtggcttcaggagcaaacgcgcagagttttgcagcaaatgagcgacgaacagctgaaagatatcggcctgcgtcgggaccagatcaattaaaacgtgcggttttttacaggcaaaccttcttcattatcccggtgagcgcaaagtgccgccgggatacattcacgaaatttatcaattgatgcggcacgaccttccgtttcttgatacttaccctgataagtattattttcttctcaataatgagaggaagccccgtgactgaagacgaactgtttgcccgccgcccgctggggatgcggatggctatggtggtgcgccagtggcgcgccattattgactccgctatcaccgataccggactcacccagtccagctggacggtgctgatgcaactgcatcagctgggagacaacgtctcggtcagcgaactggcggaggtgcagggcattgaactgccgccgctaatgcgcaccctctcattactggaaaagcagggctatctggtgcgttccacatcgccatatgacaaacgcattcgcctgctgacgctgaccgctgaggggcgggctattctggaaaaactgagctgcgtgatcgagacctatcaggagcgcgtaacccagaccatcccggaggccgatctcgctaccttcagcgccacgttaaatcaaatcgcctgccgtttgcggaatatccgcgaagaagataacaagatctaacacactatgatgacgcctgaacaaaaatttgcccgctgggtacgggtgagtattgccgcttttctgggaatattcgcctggtttatcgttgccgatatctggatcccgctgacgccggactccaccgtcatgcgcgtggtgaccccggtttcgtcgcgggtctccggctatgtctcgcacgtctacgtgcacaacaacagccaggtgaaaaagggcgacctgctgtatgagctcgacccaacgccattcattaataaagttgaagcggcgcagatcgccctcgagcaggcgaaactgagcaaccagcagctggacgcgcaaatcgccgccgcccgcgccaacctgcgcactgcgcagtacaccgcgcgtaacgataaggtcacgctcgatcgctaccagcgcttgagtacgatgcagaacgtctcgcagtccgacctcgataaggtgcgaaccacctggcagaccagcgagcagtcggtctcggcgctgaacgcgcagatccagaacctgctgatccagcgcggcgagcgcgacgataagcgcaacgtcaccctgcagaaataccgcaacgcgctggaggaggcgcagctgaacctggcctggaccaaagtgcgtgcggaaactgacggcatggtcagcaacctgcagctgaacccggggatctacgccaccgcggcgacggctgtgctggcgctggttaacaacaacactgacatcgtcgccgacttccgcgaaaaaagcctgcgccacaccgcggtgaataccgatgcggcggtggtctttgacgccctgccgggtcaagtcttcccggcgcacgtgaccagcagcgacgccgggattctggcgggacaggaggcggtgaacggccagctgtcgcagccggagcagtccacccgctgggtgcgcgacgcccagcggatgcgcattcacgtcgcgctggatcagccgctggacaaaccgctgccgaccggcgcccgcgctacggtgcagctgtacaatagcgagggaccttttgcccgcaccttcgccggcctgcagatccacctggtgagctggttgcactatgtctattaataccctggcgcatgtctttaccccgcacggcaatatcgtctacacggcgaatgattttcgccagacggtgcgtatcgccgtggccgggaccattgcgctcagcatctccaccttctacgacgtacagtacggcgtatttttcgtcgtttatccgctgatgctgatgtcgctggtaccgatgttcaacctgcacgtcgcccgccagtttatatttagcgcggcggtaaactgtgtcgaaatggtgctaattgtcggctatttgtcgcagtggccggtgatcatgaccctggtggtgtttgccctgtacgtgatgcgtttccgctttatgagccagggaccgctgttcctgttgggatcaatgggggtggtgtgccagagcacgatgctcaactttatgagctatcccaccagcaactggcacaccctgatgttctccaatatggaagcctgcgtgatggccgtggcgctgagcgcgctgctgcattacctgatcccggacgtcgaaccgcgcaagccgccgccgcggattgagaaagacgccgcccgcatccgtcatgagtcgctgctctccggtacggtagcgacgatcatctttgtggtgtttcagatctgcgatctcagcgactcgctgtcggcgctgatggccgggatcctgatcctgttcccgatgcactatcgtggggcggtgatcagctcgatctggcgcgtcgtcggggtggtgctggcctgtctctatatactggtggtgcagctgattatctatgatttcagcaaccacatgatcctgatgatgccgctgattggtctcgggctggccttcagcgcccgcctacacgtgatggagaaagtgggcgccggggtgggcttcgccagcatcactaccatcggcattatgttcggccagaatttacatccgtatcaggatctggtgttcagcgatctgtaccgcatcacctcggtgacggtctcgctggtggtgacgctgaccctggtttttctcatgcaccgcctgctgaactgtttcgcggcgacgcgttttgtggtgagcgattaacctgcaggtgggaaggtggcgagacagcgccatgcttccccgttctgctgatacagcgccgccgtctgttccgggacgatccagcctcgcgcatcggcttccgtcccctccagcaggatgcacagcccgcagccgctgcgcagctggcggggtatatctttgacctcgaaggctactcccgccgcctgcatggctttgcgcatccgaaccacccccaccgtggagtgaaataaaaacagaaacgttgtcatccgcgcctccgctggcgctggccgatcagcgccgcgccgatcgccccggcaaactgggcgtcgggatgggttgtcaccgccatgccgacatggctttccagcatccgggcaaaggcggcgcagtggctgacgccgccggtaaacagcagcggcccctgcgccgataagcggccaataaagttcgcgctgcgccgggccatggcgttaatcaccccggccagaatcgcctccggcgcgacgccggccgaccgcaggctaatgacctccgattcggcaaacaccgtgcacatactggtaatggcgtgcggttccacgccgtcggtaatggcgtccagttgttcgacgctggcgccgagggtgcgtgaaatgacttccagaaagcggccggtgccggcggcgcatttgtcattcatcaggaagtcgctgaggttgcccccggcgtccagctggataactttgctgtcctggccgccgatatcaatcaccgtgcgggtgtccggcgccagcaggcgggcgccgaggccgtgacaagagatctccgtcacctgcttatcggcaaaatccaccagctggcggccatagccggtgagggttaaaaaaggcgtctccgtgaggccagcgcgcagtgtctcccaggcctcgtggatggcgtcggcggggcgaaagggggtggggcagaggaagcggcgcacgatgacgccgtccgccagcaggatgccttttgtggcggtggagccggaatcaatgccaaccgtatagttcacgccagctccttacagcatttcgataaaggcggcgacgcgggtgctgagctggccgaggtccgctgtcgaatagtcggtttcaatcgccatgtaaggaagatcgtgctgttggcgcagatggcgtttaatcgccagcgattccacggcataggtatggcaggcctgcaaaatgacgtcgatcaccccgtcggcctgatactcctccaccatctggctcagcagctgcagacgctggtcgttgggggagatacaggagcagccgatggcgagatatttatcggttaaggcgtcgtagacgtcaccctcttccgccacgcagcgctcggtcgctttcgcgccggtgcagttctcatagccgaccacccagcctccgttttcctcgatggcgcggaccactttttccgccgcgccgccgatcgggcagccggtgatcaggatccgcggacgaggttccagccgtttaccctgctgccactcctgatggatgcgctccgccatggcatgcagttcatcaatcagggcggttttgtcgaaacgaaaagtggcgccgtacaccactttcaggatgtcgccgccgctgagcgccggcggattgagctgcccgagacgataaaagtgggccagcgcccggcgctcgcgatttttcaacacgatggcttcgcgcagcgccgcctcgctaatcggcgtgccaaatcgggcctcaatcacctgctgcaggcgcaggatctccgttttccacagtgcgcgcgaggcggcatcgctggcgctgttcggcaactgcatgacgtggaccgccttgaactcggccatgtactcatacattttctttttgccgtcgcaggtggtttccccaaccaccaggtcagagaaatagaagtagggacatttatcggttttgccgaagccgtagctgcttttgataagcgggcagaggttgcgcgggagatctttttccgcttcctcgatggtttcatcggaggttgagcacagcgagacgacaacggcgcccgccgccatggcgatctcctggggcataaaggtgcagtaagtgcccaccagcggtacgttctgctctttaagatccatgacggtgagaaagcccttctggcgagcttctgagaactggtcaaaaatggcgggtagatcggtgataagcgacatggttttccttccccgtacacgggagatgctgaaagagtcgccattatagccatggtgtatgcagggttttattgatctcctgcgtctgtacgcggtgttaatagacctttttcaaatccatctcttcctggatacgctcgctccatgcctgatgggtgcggatggcctcttcgataccggcgttgtaaaacagcggccccagctctttggcgataaagtcgacgaaaaattcggcgtcaaactgctccagttcgaggtcgaaggtctctgcgcagtacttgctgagcctgtcgcgcagcaggtcgcgctgcgcctggctgagttcaatgtcattcatgatggggctttctccgtaaaagggctcacgactgccgggcttcgatcaccgcttgtccgcgctggtggcgtaacagtccggccaggcagcaggcggcgacaatcccggcggccaccgccaacaggtggaaggggagtctgccgccatggaaccacagccagcgcgcgccttcaattgataacgcgctgacgctgaggatcacgatattcagcgaggcggagaccgtgcctttcggcaggtcgttggaaaagagggtaaagcgaaacagcgtcgggaaaatcagcccgatgccgaaggcgtagaagcaggtgccgagcaccgaccacagccagacgtggggccataccagattgccaacgatcaggatggccaggccgagcatctgtaccggcaccgcgctgaggacaaagcgcgggcgggtggggtcttttacccagcgcgccaccgacaggttggcgatgataacggcgctgaagaccggcacctggctccaggcgaactcgctggtggtcagtccgccggcgtccattaaaatcaccggcgataccgccacccagttcatcagcggaatatagctcagcgacagcgtggcggcgccgagtaaaaagatgcggttgcgaaagacgttgcgaaaatcgcgcagcacgcccacggggctgaacggcacatcgccgcggcgcaccgtctccggcatggtcaacagcaggccgagccaggccaccaatcccatggcggcgataatgccgaacagcgctttccagtgaatgaaatgcatcagcgccgcgccggagagcggaccgacgatcggcgccaccagcacgacggaggtgatcacagccatcagtctgatcgatcttttttcctcaaaggcctcttgtacggtgacgtagccgacggtggctataaagcagatgctggtgccctgcacgaagcgggcaatcaggaactgcgtcatggaggtggtgaatagggtcgccaggcatgcgagggtgaaaatcagcgcgccggtgagcagcaccggacgccgtcctatccggtcagagagcggccccagcagccactgtagcgccatgccgccggccatatacaggctcaccgaggccggagccagcgccacatcagcattgaaatcccgcaccacgtgcaggatccccggctggatcagatcggtagtgagataagcggaaaaatcatatagaattaacgccgccgggaagaacagcgcggcggcgtgtcggctcagccagtgggaaatcctgtgcatcatctcgccctccctgtggaatatttatcagcgctattgttcggatagtatcattgctaaccaatatgcagatgcagcagcgaggggatctgcgagagcagccacaacaacaggccgatggttccccccaccagggtaccgttgatgcggatgaactgcagatctttaccgatattgagctcgatctgccgcgacatatcgcgggcgtcccagctcttcactgtgtcgctgatatggcgggtgaggaaggcggcgaactccggcgccacccggtgcgccgcctgctccaggtgttcgttaagcgattcgcgcagcgcgtcgtcgcggagtaaggtttcaccgaaccactgccccgcctcggcgatacgctgcttaatacgtgagtcgtcgctgctgatatcgttttttacccagccgcgcaggtcgccccatacttcgccaagatagtggttaaaggtctcatcattttttagccaggctttgatgttatcggccttctgcgccatatccgggtcggatttcaggttatcgataagcttttgcacggcgcggtcaaaagtctgacggatctgatgcgtacggtcgtgagtcacctcgtccagcagggtattcaccgcgtcggtgaccatctcagcgctgtgctcgccgagccactcggtgggtaggagtttggccttcagcgggtgttcggtctccagccagtgtacgatgccgcgggcgataaaggcgcgggagctgtcgcgctgcagcagggcaatcagttggtttatcagcgaatcgagcagcttttgatggcgattgtcgcgggtcagcccctccagcatcatggcgctggtctgcgtcaggtcgaccttatcgatagccttatgcaccgcgcgtcgcagcagacgttgaatgcgcgcgtcatcggtcagttcgagaaaaccgctcatcacctgcagcaggtgctggccgacccgccgggcgttctccggctggctgaaccagttgccgagcatcagggctggctgatagcggcggatcagcgcgaccagcgacggggtatcaaggaacttttcctcgacaaagcggccgaggttgtcggcgatgcggtctttattgcgcggaataatcgccgtatggcgggcgacaaagggcagcggaatacggcgaaacagagccacgaccgcaaaccagtcggccagcgccccgaccatcgccgcttcggaaatagcttttagcgcaccgacccagggcgacggtggtagcgcgagggtagtgataaaaatggcggctgcaatcagcagcagcgacagcgccagcagtttggcgcgtttcagttcagcgagtttttccatatgcttaagcatatagcctgacggcgaggtcgtgcaaaaatcgccagataatccccaggccgaagagcatcaggatcgcccccgccgcccgctcgactcgccagacgatggcgcccaggcggcgctgtatctgtggcagcgcaatcgcgctcaccagcagtaaatcccagaagaacaccacgctgaccatccacagcccgctcaccgtttgctgaagcagggtcacagccgccccgagcagggaagtcatcagcgccagataaaacagggcgtttttggggttgagcagcgatgaccccagccctagcagcagctgcctgccgaaccccggacgcgctgcgcgaacgctctccatcgccagcgtcgcgggacggctgcgtatcagcaggctgccaatccacaataaatagcccgcccccagcagctcgatgagcaaaaaaagcagcggcgcctggcgcagaagcccccagccgacgatggcgagcacaatatacagcgcattgcctgcggcgatgccgagacacaatccgatgctgccgcggatccggtagcgcacggcgtagccgaccagcagaaaaaaatcagggcccggactgagcagagcgacaaagtgggacagggctagcgccgggaagacggcgggaaagagcgtcgataaggtatgcatagtggcctcgataatggtgcagaggccaccctacgccaggtggcgtattacttattgtcagatattgatctgctttgcgcatactgccgcggcgtggcggcggtatagctgacaaaggttttatggaaatggctctgatcggcaaagccagcctgatagccgacgtcggcgataggatccccggcgcgtaagcgcgttttcgcatattcgatgcgcgccatgttgatcaaactagcgggcgtcaggccggtatcttgtttcacggcgcggataacggtctctttacgaagcgcgctgtcgtgggccagcttatccagcgacggcgacgccggcagatccatcgccaggcgctgaaacagcagggcgctggcgtgatgtggcgcctgcggcgcggcggcgcacagcggcagcgcgtgcaggagttgcgccagccgggcgggcagttgttcaaggctcccgcggctcatcagggcgacaacctgctggaaactggcaaagagagggctgtcgcgcagcagcggctgcggcgaggtgatactggcgccagggggaatatccgggcgctgcgcgtggcaccatgtcgcgtccaggtaaagcatgtgatagctgcgcggcctgccatgcagcggattacagctatgcggcgcgtgcggcgggatcacgatcagatccccgggttgcagcaggtactcctggccagcgcacaggcagcgcgtttccccctcgataatcgcccccaccgagagctgggggtggctgtggtgcttataggcctggcggctgcgccaggtgctgcgcagctccagccacggcagacgatcgtctcgccagaaggtttgggggatatctcgggtatggttcactgctttggcctttgctgcggggataagccgtttatagcatgctgcgccgaggctgtcgcccgcctggatttgcgtaccgcgtcgaaaaaggatgtcacgcttgcagtccggggaaatatgttttcgtagcggaatgtaaaatcccggtttccgggggtgccagagatattcatgggaggtagagtccctgcaggataagcaggcagggatgagccgatggcaaagggcaccacctcgacgccgcatgatgcggtgtttaaacagttcctcactcaggccgacaccgcgcgcgattttctggcgatccatctaccgcctgcgctgcgtcagcgctgcgacctcgataccttacagctggaatcggcaagctttatcgaggagagcctgcgggcctggtactccgatgtgctgtggtcactcaaaaccgcctctggcgagggctacatttatgtggttatcgaacatcagagctcgccggatgcgcagatggccttccgcctgatgcgctacgccatcgccgcgatgcagcgccatcttgatggcggtcatacaaaactgccgctggtggtgccgatgctcttctatcacggagcgaccacgccatacccgtggtcactcaactggctggactgttttgccgatccacagctggcgagtgagctttatatctcgccctttccgctggtggatgtcacggtgatccccgacgatgagatcgttcgccaccggcgcgtggcattactcgagctgatacagaagcatattcgccagcgcgatttaatgggcattgttgagcaactgacgacgattttacttagcggggacgctaatgacagacagctaaaaacgctgtttaattatctgctgcagactggcaacgcgcgccgctttggccggtttatccacgaagtggcgcaacgggttcctcagcacagggagagattgatgactattgctgaaagattacaggaagtgggccgcagaaaaggcaaacgggaaggccggcttgaaggcagacaagaaggacagcatgccgaggcgctgcgcattgcccagaggatgctggccgacggcattgcccgcgagacggtggtgaaaatcaccggcctgaccgccgacgagatcgccgcgctggcgcattgataacgccggggcggcctgacggtcgccccggttagcctcgttatggaatattccggatatacctaactttacccgcatcgccagccatctcgactacccttaatatccttaacggcatttttgactgccttagtagcgataacaaggagacatgcgatatggcctatcagacggtgaatcctgcgaacaatcagcttattaaaacgtacccggcgcacagcgatgcggacgtggaggcggcgctgcagcaggcggatgcgctctaccattctgcctgggcaaaaggcgatattgaaccgcggctggcggtactgcataagctggcggatctgatcgatagccgggcggaggagctggcaaaaatcgctagccaggagatggggaaactcattaagcagagccgcggcgaagtgaaactttgcgctcagatcgcccgctattacgccgataacgccaaatcgttcctggcgccggtgaagtatccctccgaactgggtgaagcctgggttgagcaccatcccattggcgtcttactggcggtggagccgtggaacttcccctattaccagctgattcgcgtccttgcgccaaacctggcggccggtaacccggttatcgccaaacacgccagcattgtgccgcactgcgcggagacctttgcccatctggtgcgtgaggccggcgctccggagggggcgtggaccaacctgtttatctcccaggatcaggtggcgaagattatcgccgacgatcgcgtgcagggcgcggcgctcaccgggtcggagaaagccggcagcgtggtggcggcgcaggcggcgaagcatattaagaaatcaacgctggaactgggcggcaatgatgtgtttgtcgtgctggacgatgccgacctggagcgcgcggtgaaaatcggcgtccaggcgcggctgaacaacgccggccaggtgtgtaccgctgccaagcgctttatcctgcacgaaaatatcgcggatgcgttcctgacaaaatttagcgaggcgtttcgccaggtgaaaatcggcgatccgctggatgaaagcaccacgctggggccgctctcttccaaagatgcgctggataccctaagcaaacaggtggacgaggcggtgaaaaatggcgctaagctgcatctgggcggcaaagcggtggctcgagaaggcaatttctttgaacccaccattttgaccggtatcacccgtgataatccggcgtacttcgaagagttctttggcccggtggcgcagatctacgtggtgaaaaacgatgaggaggcaatccagctggccaatgattcccactatggtctgggcggtgcggtgttcagtcaggatatcgaacgcgccaaacggatggcctccgccattgaaaccggaatggtttatatcaactggctcaccgataccgcgccggagctgccgtttggcggcgtgaagcgttccggttacggacgggagctctccgatctcggcatcaaagagtttgtgaaccagaagctggtggtggtgcgccgctaagcctatgacccggccataaaaaaacctgccattcggcaggtttttttatggctaatgctcagcgcaccttaactttatcgcggggcgttgatcataatcagaaggtgaccccgccgcccacataggcgccatcaatcagggtgtggttcgggcgaccctctttaccgtcaacgctcacatggcggtaacccactttcaacgtcactggaccaatcggagaccagctcacgccgccgttcgcttcaacatagtttttcacgctgttgttcagaccatccggcgcgacatacccttcgccaaacacgtggatgctgtcggtcagggtcacgttcaccccgccgccgaccggaaacgcgacgccgttatcgccttttttcggcccgaggtagatggctttcgcgccggcgttgagcatcaccgggcccacttccaggttgtaacccgcgcccacgccgccggtctggctaccatcatcggtattcttcagccagtggctttcggcgtacaggccagaagaggatttacccatttccatattcagattagtgaagtttttaccctgttcaacggtaaaccccaccgccatggcggaaccagagaccgcggtcagggctgcaagaataaggatgttaagctttctcatggtttactcctcgtcaataaagttgtctgagggcaccttaacaagcgatgtttacctctgcaaatgtgacttgcgtcgattttttatgctggttttgtcaggaaggtgttttgaaaatgttgtaatgacgttgggttacggcgaggtcaatcatcaaatttagcctgtttagccgtggtttaattggtgggctaaacagaaactgaacagagcagtcattaattattaaggggcctattcattcagtttcttataatttccaaaaatgtttctactgttacttattaaaacgttgctttacatttttcgacgcgctgccgacgtttggtccctgtttttgacgaggtctcagagagaagggggcctgcgccttagggcgcaggcgggcaggttagcgtcgtaaaccggcaaacgccgcgcgaatttcctcttccggcaactgaatgccgataaacaccagcgtgctgtgcggcgtttcatcgccccacgggcgatcccagtcggcgctgtagaggcgctgcacgccctggaacagcaggcgatttggctcgccgtcgatccacagcatgcctttataacgcatcaattgctcggcgaaggagagcagcagattttccattacccgtgaaacttcactgatatccaccggatagtcgagctcgaccacaatcgacgagacgtcattctgtttttctgccacaaaatgaaagcgcggtgtggcgctgacaaccttctcttccagcataaaaccgctggtgttaaacaactggcttaaatcgatatcgccgtgaatgacggtataaatcggcgcccgcgcgttaatgcgcgccagccgttcacgcagcttttcggtgtcgccggcgacgtcggttttggttaacaggatccggtccgcgtagccgacctgcgactgggcgatggtgaactgatccatctgctggtcggcatggacggcgtcaaccagggcgatcacgccgtccagcagatagcgctcgcagagcacctgatgggagaaaaaggtctggataatcggccccgggtcggccatgccggtgcattcaatcaccagccggtcaaactcgatttcgccgcgatcgcgactgtcgaggagatcgagcagggcgtcttccagttcgttggagcgtgtacagcagatacagccgttggtcagggttttaatctgcgtggcgcggtcgccgatgagctgatcgtcgacggagacttcgccgaattcgttttcaatcacggcgattttgaaaccgtgctgctcattgaggatatggcgcaggagggtggtttttcctgcgccgagaaaaccggtgagtagggtgactgcaatcggtgccattattgcctccattaacagcagcgtacgccgcctttgccgtcgccgccgtagcgggcctgctggcgttcgcggaagaattcttcataagtcatgtacggctgatccggatggttggtttgcatatgcgtgacgtagttgtcgtaatccggaatgccaatcagcatttttgccgcctgaccgagatatttttttgcctgacctaagttaccaaacattataagttccagataacgaataaagccggatggcggctagcgccatatccggcctacgttaatgcgcttttggtaggccggatacgcgtagcgctatccggcatcagggttaatgatgtgacgaggtcttcacgccgccttccggtaccggcacatacggagtctctttgtcggtacgcaccttattgttgcggacattgagccaggttttgatgccgtagaagatgatgctatacaccaccaccaggaacagaatactcaggccggcgttggtgtagttgttgaccacgatatggttcatgttggcgatctgctgcgcggtcagctcgccgccggcggcaatcttctctttatactgctgagccataaagaagaagccttccatctgcgggttgctgctgaacagcttcaggcccagcgcccaggtggtgcacagcagcagccatgccgccgggataacggtgacccagatatatttggtgcgctgcatcttgaccagcaccacggtgccaagcaccagcgccacggcggccagcatctggttagagatcccgaacagcggccacaggctcttcacgccgcccagcgggtcgaccacgccctgatacagcaggtagccccacagcccgacgcagccggcggtaccgataatcccggcgaccagcgagtcggtttttttcaggaacggcacgaagttacccaacagatcctgcagcataaagcggcctgcgcgggtacccgcatccagcgcggtgaggataaacagcgcttcaaacaggataccgaagtggtaccagaagcccatatccgccatcgggatgattttatggaatacgtgggcgataccgacggccagcgtcggcgcgccgccagcgcggttcagtaccgaaggttcgccgatatctttcgccgtctgcaggatctgctcaggtgaaatcacaaagccccaggagctgacggtcgccgccgcgtggacggtgacttctttcaactgcgctgcgatcatcgccgcgttttcaccgcccatttcatgcaggttcggcatgacgatgcccaggcctgccggcggggtgttcatcgcgaaataaaggcccggttcgataatcgaggcggcgaccagcgccatgactgcaacaaaggattccatcagcatcgcgccgtagccaataaagcgggcatcggtttcgttggccagcagcttcggcgtggtgccggaggcgatcagcgcgtggaagccggagaccgcgccgcaggcgatggtgataaacaggaacgggaacagcgcgcctttccacagcggaccggtaccatcaatgtactgggtcactgccggcattttcaggtccgggttgaggataacgatccccagcgccaggccgacgattacgccgattttcaggaaggtggccagataatcgcgcggcgccagaatcagccataccggcagcagcgcggaaatgaacgcgtagccaatcagggtaaaggtgatagtggtatctttaaaggtcaacgccgggccccagtacgggtcgtgggcaatcacgccgccgaaccagatagaggccaccagcagcacgataccgataaccgacacttcaccgacgcggcctgggcgcaggaagcgcatgtagatccccataaacagggcgataggcaccgtcgagcagacggtaaacacgccccacgggctttccgccagcgctttcaccacgatgagcgccagcaccgcgaggatgatgatcataatcaggaagcagccgaacagggcgatagagcccggaaccggccccatctcctgtttaatcatctcgcccagcgaggcgccgttacgccgcgaggagataaacagcaccatgaagtcctgtaccgcgcccgccagcaccacgccggccagcagccacagggtgcccggcagatagcccatctgcgcggccagtaccgggccaaccagcgggccagcgccggcgatcgcggcaaagtggtggccaaacagcacgtagcggttggttggcacatagttcaggccatcgttattaatgaccgccggcgtggagcgcgtcgggtcaagcttcatcaccttctgcgcgatgtacaggctgtaataacggtaggcgacgaggtacacagaaaccgatgcgacgacgatccacagggcgctgacgtgctcaccgcggcgtagggcgacgactgagaggcaaaatgccccgatgattccgagaatcacccagggtatgtgcttgaatagttttttggtatccatagtaaaacctggcgttaattagatgaataattggccgaagccgtatggttttaagttagggttgatggaggtattgattagctaggctgccttcgatcttgccagaacagcgcgcgcgtaaagttgggtaaatcggtgagtggttgtatagggggttaagcggttacttgcgggggtaagcggttagatatgagtacgagagcgcgtaaatgtgtgattaagctcacaatattattctgcgcatctcaaagatatgctttcaaactgaggataacgatttttatcacccgcagatcactatctttatttcaagtagaggtattttgatattatgctgactttgccatgtcgtatggatagcgtttaacaaagggaattcgagttatgaaatttgtaaagataatgatcatcgccagtgctttttacttaacatatgctcatgcaagagagatacatcaggctgttgatgagccggcagccccttataatttgcgctgggggatgagttacgatgaggccagaaacacgcctttatattctctggaggtatcagatatcaattatgccggaaaagacccggatctgattatctcaacgctgactccccaggaagtgggggcgttgaaatatcaggagatgaagctttattttgataagaataaagggctgaaaagtgtttttgttagcgctgatgttgattccagtcagcaggcctataaagttgatgatggccgggaagcactcgccttatataatgaggaagttaaggttcttgatcgagaatatgggccagcgacaatcaaagaagagttcattgcagaaaaagggaaattctatcaaagtctttccgcctgcattgcaaaacagcaggagtggtataataaaagattagatctgaataaaataaaaaaatgttcaacctggcaacgtacttataaaaaaggtcgggtaaccgttttgctatacatcgaaccgagacaagtttccaaacattatatttataaataaattaaaggacttaacggtgagaatatataagattttttttagaagtattgccatggtcattatggttatgatcctttctgattgtcgtcagtcgtattatattgccagaaatacggggcgcaatataatgaccttatccgaccatcagcgcgctaaatcggcgttaaacgctaacgatttaaatgcagctcagggctacctgacgggagaaaaatacaataatcgctacaggcctgttagcggtgaggaatcctggggaagtttacaatatcgggcggcgaaaatcgtcgccaacgccgcggcgaacggtcaaaaagtgcgtgatgatgcgctctatctcgcttatatctctttgtttgaagcagaagagggagtgcccgaacatcccgatattatgttgggttacatgcataaagccatggcgctactgttagcgaatccgcaattactcgataaaatcgattctaaaaatgtcagtactttacccagccagtttacccttgaacgctatgctgtatggcaatatttatacgatggcggcgagattgactggaccaaaaaagcgcctgaaggtgaaggttatacaattgctggtgaaagctatcagacctggaatatcaagttaaaaaaagccatctggaatcggggagacgcttttttaacaaatataggtaaacaacaatttattcatgacgctatagattattcgcaatttccggttattgcctgtaccgccaggcgaaaaggctggcacttaacattacctgctgactaccgggaacaaaatttccgcggcggtggacgttttgattgggcttcatgtcgcgctgttgaataaggctggcgggtgagatgacgcatattaagcgccaggtttacgtatcgggcgataagtaaacctgggcgcggattttagactgcgacttccatttccatcatcaccgggtggaaacggcgtttaaagtaaatcaggccgtgcccttgcgggctcagggtaatattgcggatctccaccagatacaccaggtgggtaccaatggtttgcacctggctaatctcgccttcgagactggccagcgaacctttcagcaccggctgcccgagcgcgccctgctgccagccgctgagggcaaaccgctcttccatcgtcaccccggtcatcccggcgaaatgacgggccatgatttcctgttcgtggttcagcacgttgatgcacaacttgccgttaccctgaaacaccgggttcatcgcgctgttggcgttgatacaaaccatcaccgatggcggcgtatccgtcaccgagcataccgccgtggcggtaatgccgcagcggccggcttcgcctgcggtggtgacaacgttaaccgcagccgacaggctggccatggcatcgcgaaaacgcaggcgttgttcatctaattgcattatgacctcccgctgtgaattacttcagcagcttatccaacatgttgatatcagcattattgtgcagatgcggcaccgtccagccgttctggtcgtactcggacaggcagcggtcgaccatcgccatcattttgtccatattgccggagctctgcgcctggcgcagacactgcaggcgaatttcatcctggctaccggagtagttgatctcatacagttcatggcggccgccgaattcgctgccgatggcgtcccacatcagtttgaggattttgatacgttcaacgtggtccataccgttggagccgcgcacgtacttcgccagatactggtcgatctgcgggttgttcagatcgcgggcgctggacggcagataaatcaggccgctggtgacgttgcgctcgatgatgttcttgatcttggcgtaggccatcggggccatcacgcgataggtctgcagcgcggcgtgatccggcagccatgcgccgttgacccacggcgtcgcttccgagcacatagaatcgcttaacgcccagaacatattgcgccacgccaccacttcgccaaggtcggcctgcacgccgcggaattcgagggtgccggtacattccagagagcgtttcagcagggcggtgataaagtccagttttaccgccaggcgcacgcaggcctgcagcgggtacatgcgggcgaaaccaccttccatggtccagcggcggcagcggtcaaagtcgcgataaatcagtacgttctcccatgggatcagcaccttatccattaccagaatcgcgtcgttctcgtcgaaacggctggaaagcggatagtcgtacggcgatccggtcgcgccggcgaccatctcataggaggcgcgggagataagcttgacgccttcggcatccatcggcgcgacgaacatcagcgcgaagtccgggttctcgcccatcacctgtgcggagccgaagccgatcatgttgtagtgggtcagcgccgagttggtggcgaccactttcgcgccgctgacgatgatcccggcatcagtctctttttccagcttgatgtagacatccttcacttcatcagctggcttgtggcggtcaatcggcgggttgacgatagcgtggttaaagtacaggccggtttcctgaatgcgggtgtaccagttgcgggcgttctgctcgaactggccgtaaaacgccgggttggcgcccagcgcgcagccgaaggcggctttgtagtctggggtgcggcccatccagccgtagcttaagcgcgaccattcggcgatggcgtcgcgctgctggcgcagatcgtcggcgcttttcgccacgcggaagaatttatgggtgtagccgccgctgccggtatcggtgccccagcacagggaatcctgcatctccggtttgtgcagcgcatcgtacagctgagcgacggaggccgcggcattacggaaggccggatgcgtggtgacgtctttcacgcgctcgccgtagatataaatttcgcggccatcctgcaggctttttaaatactcttcgccagttaacgggcgtttcgcgtcggcgcggaaatcttcaggtttcataggggcctcttcagtatttatcggaataataatgttaaatatatgttttgtttttgttgtttaattgaagcggttatggcgcttgtcgtgaagggacgtttgcgacaacggcgggtacttttcaggcgggagtgaattttgtgatctctgcaacttttaccggctggcgcggcgctgacccgccctacggtctgtagcccaggcaagcgcagcgccgccggggtattacgacaccggtactttttgcgcccggtagctgctgggcgagcagccgacctggcggctaaaaaagcgcgcaaaataggcggggtctttaaaccccagctgccaggcaatctcattgaccgcgctatcggaaaacagcagcaggcgcttcgcctcgcgcagctgacggtcaaatatcagccgcttcggcgaacggttggcaaagcggcgacagatatcggtcaaccgcgattcggttagatgcagctccctggcgtaatccggtaccgtccagtgctgatggtagtggctgtcgatcatctggttaaagcgctggaataatttcagctcgccgcgcatcccgctggcggcatgatcgtcgagcctggcgttgcgcagcagcagggtaaagaccgcctgcgccagcagcgccagggtatgctcccgccccggtagctgggcggtggactcccggcgaatcagctgccagtagtgcgccagcgccgccagctcgtcgggtttatccgccagcgacaggcagatccccggcaggccgaaggtctcccgcgtgccgggataaagcacctccagcagcggccagatcagctcctcatggaccgtcaacacgtgaccatcgctatcggactcggtaataaaggcgtgcggcaccgagggcggcgttatcacaaacagcggcgcctgcaccgaatagcggtggtcatcaagctgcagctcaatctgtccggtatcaaggtagtgcatctggaaatagcggtcgtggcgatgcgcctgcatgtcgcggccaaaaaaggccgccatgcgggagaacgactggtagtgcacctcttcggtacccagactctcgtcgtaatctttattgatgtcgatgttggcgattgaatgctggcacatacccgctccttagtggcctttttgcgccgctaatcccggcgcggcggcggcgtcctcacgctggctcattggaatgcgggtaagcaccagcgcgccgacgatcagtaatccggcgacaaaccacagcccggagctaaagctgccggtggtatcacgcaaaatgccgatcaacagcgggctgacggcagagccgacgttgccgatagcgttgatcaccgccagcgccaccgcgcgtgactgcaggctgatcacccgatccggggtggtccagaaaatggccatcgcggtaaaggatcccaccgaagccataataatgccgatcagttggatcaggctatggtgcgttgccgaagccagcagccaacccgccgcggcgaacaggtagggcaggatggtatgcatcttgcgctctttgcggcggtcggatcggcggctccaccagatcatgccgaaaatagtgcagaactgcgggatcgccgccagcaggccaatcatgatgttgctgctgccggtgttgaagctctgcaggatctgcggcgtccagatattaatggcgctgagggtattggtcaggcagaagtaggcgagggtatacatcagcaccgctggcgtcagtacttcgcgcagcgtggaacgcggcgaagccgggacgatcgccgcatgttcccgttcgcgatcgatcatcgccttcagcgcctgtttctcttcgttatccagccagttggctttatccggcgtgtcgttgaggaagaaccaggtgacgacgccgagcaccaccgacggcaggccttccagcagaaatagccattgccagcctttcaggttccacaggccgtcgagcgccagaatatagccggaaagtatcgagccgagcatcatggtcaccggcatggcgatcataaacagggcgttggcgcgggcgcgatggtaggccggaaaccaccaggtcagatagacgaggatccccggcagaaaaccggcctcggcgatgccgaccagcatgcgcaggatgtacagcgtatgcgggctggtggcgaacatggtgcaggtcgaggcgatcccccagaccaccatgatcccggcgatccagcggcgcgcgccaactttcgccagcatgatattgctggggatcccgcacagcacgtaggtgacgtagaacagcgtcgccgccaggccgaacatggtggaggtcaggccgagatctttacccatcgtcagaccggcgaagccgatattaattcgatccaaaaatgagaaaacaaagagaacaaacaggaaggtaatcaggcggcggaacagctttttgatcactcggttttctacttcaacggctttattatcattgtgttgcagggtagaggtagtcatgttgcgctccacattatccgttcaatagacggatttattgttatcggttgtggtggttgcgttgtgggtaaaccgggccgccagcgcttctgcgccgcgggccagcagggtggtatcgacgccgacggcgacgaacagcgcgcccagttcgagatagcgtttcgccagctgttcattagccatcaggatccccggcgctttaccggcctgacggatttgctggatggcatcttcaatggcggcctgcacttccgggtgctgcggattgccgccgtggcccatatcagcgctgagatccgccgggccgataaacacaccatctaccccgtcgacatcgaggatctgcggcagatttttcagcgcttcgcgagtctcaatctgtaccagcacgcacatggcgtcattggcccggtggatataatccgggacgcgattccagcgtgaggcgcgggccagcgcgctgccgacgccgcggatgccggctggcggatagcgggtggctctgaccgccagccgcgcttcttcggcattctgcaccatcggcaccagcagggtttgcgcgccgacgtccagcagctgtttgatctgcaccggatcgttccacgacggacgcaccaccggctggctggggtagggcgcaatggcctgcagctgggtcagcaccgttggtacattgttgggcgcgtgttcgccgtcgatcagcagccagtcgaagcccgcgccggccagcagttcggcgctgtagctgctgcacagcccaagccacaggccgatttgcggacggcccgcttttaaggcgtctttaaaggcgttattcatggtgtttctcctagacaaaccggcagctgatggcgcccatgttgccgtagtcgacgtggaaggtatcgcccttgcgcgccgggaccgggcgggtgaaggagccgccgaggataatctgcccggcttcgagctggacatcgtacggcgccagcttgttggccagccaggccacgccgttggccggatgattgagtacgcccgcggcgacgccggtctcttcaattacgccgttgcgatacagcagggcggagatccagcgcaggtcgagctcgtccggtttaatcggccggccgccgaggatcaccccggcgttggcggcgttgtcggagatggtgtcgaacactttgcgcggacgctgggtttccgggtcgatgttgtggcagcgcgcgtcgataagctccagcgccgggataacgtagtcggtggcgttgtagacatcaaacagcgtacagttcgggccgcgcagcggtttggccagcacgaaggccagctcgacttcaatacgcggcacgataaagcggtcggtgggaatatcgctgccgtcgtgaaagaacatatcgtcgagcagcgcgccgtagtccggctcgctgatctgcgaactggcctgcatcgctttagaggtcaggccgatcttgtggcctttgagcacgcggccttcggcgatcttcatctcgacccactcgcgctggacggcgtaggcgtcctcaatggtgatcgacggataatccagcgagatcgcgtggatctgttcacgctgcttttcggcctggttcagccgctgggcaatcagggtacgggtctgtttatcgagcatagagattcctgtggcattgcattgccggatggcgcttcgcttatccggcctacaaattcatggccgttgtaggcccggtaagctcagcgccaccgggcaatttgcacattatttaaataacgcgtgcacgttgttttgtttgtagttcagcgtcgggtcgagctcttccatggcgaacgacagcgccagatagcggctctccattagcgtcgcgaagtgggatttgatcagcgcgaacagcatatctcccacgtcctgacggctctccaggctgcgcccggcgccgatcttcagggtcatatgcacgaaggcgtaatcctgcctgccgtcggccatctgccaggtatccagccagtgggcgcggctgcggatcccgccgatcggaaagatgccggtggcggccagcgcctcgttgactttggcgaacagcccaggcagatcggcctgctcgcggatgttgtcggtacattcggcgataaaatgcggcatggggcccccttacgcctgcgctggcaacgggaacacggcgttaacctggccggtaccggagctggcgaatagctcggtgataaactccaccttgccgtcgtatttatcccaacccagcaggccgagcagcatcaccgtgtcgtgcatgttgccttcgccgtagcagtagtcggcatactccggcagcatggtgcagaactctttgaatttgccctcgcgccatagcttcaccacccgctcatccatttgatggtcaaattcgcgggtgtagctgttcatcccctcttcggcgcgctggtcgtcgataaagcggtgcgacagcgaaccgctggccagcaccgccacggtgccgtcgtatttttcaatggctttgaggatcgcttcgcccagcctgcggctgtcggcaaagtcgtgaacggtacagaaagcggagatagataccaccttgaagtgcttatcgctgttcatgtagcgcatcggcaccagggtgccgtactccagcttcaggctgggaatattgtgcgctttggcacgcaccccgagcttcaccgcctcgtcggcgataagctggcccagctccgggttgccgtcgtagtcgtaggtcatgtcgcgaatgaaatgcggcagttcgttactggtgtagacgccctgaaaatggtcggcgcagttgatgtggtaggcgctgttgaccagccagtgggtatcaaacacgataatggtatcgacgcccatttcacggcagcgcttgccaatttctttatgcccgtcgatcgcgccctgacggcagccgtggtttttccccggcagctcagacagatacatcgacggcacgtgagtgatttttgctgctaacgctaacttacccatatcagactccccatttcgggatcggatggtcgcccatcgagatgcagacgtttttcatttcggcgaacacttcaaagctgtactcgccgccttcgcggccggttccggaggccttcacgccgccgaacggctgacgcaggtcgcgcacgttctgggtgttgacgaacaccatcccggcttcaataccgcgcgccagacgcagcactttgctgacgtcctgggtccagatatacgacgccaggccgtattccacatcgttcgccaggcgtagcccttccgcttcgtctttgaacggcagcaggcaggcgaccgggccaaaaatctcttcctgggcgacgcgcatacggttgtcgacatccgccagcaccgtcgggcgcaggaagttgccggctttcagatgcgccggcaggtcggacggtttatccgcgccgccggccagcagggtggccccctcttcgatgccgaggcgaatgtagccggacactttctcccagtgctgctggctaatcagcgcgccgacctgggtgttcggatcggtcggatcgcctacgcgcaggcgattggcgcgctcggcgaagcgtttaacgaactcggggtagatactctgctgaataaagatgcgcgagccggcggtgcagcgttcgccgttgatcgagaagatggtgaacagcgcggcgtcaagcgcgcgctcgatatcggcatcttcaaaaatcagcaccggcgattttccgcccagctccatggagtactttttcagaccggcgtttttcatgatgttgcggccggtggcggtgccgccggtgaaggagacggcgcgcacatcatgatggcgcaccagcgcgtcgccggcggtggcgccgtagccctgcaccacattgagtacgccagccgggatcccggcttccagcgccagctcgcccagacgatcggcggtcagcggcgacagctcggacattttcagcaccgcggtattccccagcgccaggcacggcgccaccttccaggtggcggtcataaacggcacgttccacggcgacaccagcgcgcagacgccaaccggctgcacgagggtgtagttcagcatcttgtcgtcgaccggataggtcttgccgttcatctgctggcatacttcggcgaaaaattcgaaattgtgtgaggcgcgcgggatcaacacgtttttggtctggtggatcggcaggccggtatcggcggtttccatcgccgcgatctccgggacgttctgatcgataagatcccccaggcggcgcatcaggcgcgcgcgctctttcatcggcaggttagcccacttcgggaaggcctctttcgccgccgctaccgcctggttgatttcggcttcgccgccggaggcgacttccgccagtacctcgccggtggccgggttggtggtatgaaaatagtctgcgccggcaacgtttttaccgttgatccaatggttaatctttttcatgacagtgtctcctcatacgcttgctggctgatgatatggttgaccaggcggcccacgccctcgacttcaacgatcacctcgtcgcccggtaccacgtcggatagccctttcggcgtgccggtggcgatcatgtcgcccggttgcagggtcataaattcgcttaaataagcgatgaggaacgggatgctgaagatcagatcggcggtggtgccctgctggcgcagctcgccgttgacccaggtgcgcagggccagattatgcggatccgggatcgcctctttgctgacgatccacgggccgatcggcgtcagggtgtcgcggcttttcacccgcaggttcgggcggtagtagttttccagatagtcgcggatcgcgtagtcattgcacacggtatagccggcgacataatccatagcctcggcttcgctgacgcggcgcgcggttttcccaatcaccaccaccagttcggcttcgtagtgcatgtattcgacgttatccgggcgtaccgactgctgctggtggccagtaaaggtgttcggcgctttgatgaataccaaaggctcggttggcggtttaaattccagctcgctggcgtggtcggcgtaattcagccccagcgcgaacagcgtgccgttggcgggcggcagccagcggaattccccttcttttaataccgtgccatcgtccaggcgcacctggtcgcgttcattgaccagcacgtcgcgtacctgtccctgccattcaatgcgtgcctgtttcatgccagctctccttctgcgacaaccgggttttcgagcgccgggaaaccgtcggcgagaatacgtacgcggtcgccggggcgcagcgtgacgcgggagtggggcgtgccgataaggatcgcgtcgccgggattgagggtagcgaactcgcttaaggcgctcagcagctgcgcggcgctacgctgcagatcgccggtatgccagctatccgcctcgcggccgttaatttcggtgatgatggtcagatcgtcgacgttgcgtaccgccgatagcgtgccgatggggcagaagccatcgcggcacttggctttgatcgccggacgataaaaactctcttccggcagactcacatcgttagccagcgcgtagccagcgatatagttcgccgcctcttccgccgccactttacgcgcggttttgccgacaatcagcgccaccgtcgcgccgctttgtacggtctcgccctgcggatggggaatggcttcgccatcgccaatcacggtattgcgcggcttgataaaccagaccgcggttttcggcggcgtcttgtagggggcctgttgaaacgcctcgcgccaggcgtcgagctggctgcgatgattgagcgcaacggcgaagatggtacctttcattcaccactcctctgggacagatttcggttcaaagggatttcgttaatatattaatgatcatcttttatgctttgcgctgaggtttagcaactggaagtgaatgttttgtgatcggattaacacaatatttacatagcaattacttatttgttgaaaatcaataacttgaatatttttcaggaaaagactggtacttttcaggtgcagaaaccggttgtacatggcaggattaacgctaattattaagttattaataagtttttggtgaggctgttgaggggatactatgcatgattcattaaccattgccttgttgcaggcgcgtgaagcggcgatggcctactttcgaccgatcgtcaaacggcacaatctcaccgaacagcagtggcggatcgtgcgaattctcgccgaacgtccgtcgatggactttcacgatctggcctttcgcgcctgtatcctgcgccccagtctgaccggtattttgacgcgcatggagcgggatgggctggtgctgcgcttaaagccagttaacgatcagcgcaagctgtacgtctcgctgacgcctgccggaactgcgctgtacgaaagcgcccaggcggaggtggaagaaacctatcgcctgctggaggcccagttcaccacggaaaagctgcagcaactgacctccctgctggaggagtttattgcgcttggcgtccctgccgggcgcggcgatgaagaagagtagcggttacggctcggcgctcagcctggcgagggcaataagcgtttccgcgcgggcgggggacagcggctctctcggctgcggcagcggccagccatacagccagcgggcgctgggtcagtttggcctgcagccagtcgtcggcggcagccacgtcgccgcagcgcacatcttcgcaacggcacagcaggctctccggcgtcgccgcgtttttcaaagattccgccagccggaaggcgcggtttatggcgtcggcgaagcgctgccagcgccgggagcggcgcttgctcaatgatattcgtcacgtcgcctccggcctggttcatcgtatccgccaccgcctgcaggccgcccgcgctgcagcagaggatcagtttctgccagtaaaccacgccgccgccgtcggcggtttcaaacagcacgctgtgcgcggaggggcgggcaatcagccgcgcgccgttcacctcccggatggcggcgatgtcgttggggatttactactggggcgcgcgcagctgcctgccgcaggctaactttagcggagacgaagaagagtaaaggagaacagtatggagtcggtaactctatcgttacctgaagcttatgacctggcgctggaggtactcagcgccaatggatttagcgccgaccacgcggcggcgattgcccgcaatgtgaccgccggggagcgcgacggctgcgcttcccacggcctgtggcggctgttgggcattgtcgataccctgcgcaaaggtaaggtatcgcccgatgccgagccgcagatccatgaccaggcgccggggattgcgcgggcggacgccgggggcgctttttcactgctggcctacgagcgcgcgctgccgctgctgctggagaaggcgcgccacaatggcattgcggcgctggcaattaatcgctgcgttcatttttccgcgctgtttgccgatattgagccgttgaccgaggcagggctggtagggctggcctgtacgccaagccacgcctgggtcgccccggcgggcggcacacgtccgctgttcggcaccaaccccatcgccttcggctggccgcggcgggataagccgccgtttattgttgatatggcgaccagcgccgcggcgcgcggcgagatccagctgcatcagcgcgccggcaaagcgctaccggaaggctggggaatcgacagtcagggacagccaacgaccgatgccgcagaggtgctgaacggcgcgatgttgactttcggcggccataagggctcagcgctggcggcaatggttgagctgttggccgggccgcttatcggcgatatgaccagcgccgaatcgctggcgtgggataacggcgcgggcggtctcccctacggcggcgagctgattctggcgctggatccgcagcgttttctcggcgcacaggcaccagagcagctggcgcgcgccgaaacgctgttcatgggtatgcaggaacaaggggcgcggctgccgggcgagcggcgttttgcctgccgccagcagagtgaacggcagggggtcattatcagtcgttcattgcatgatgagatttgcgccttgcgccggggcgggtaaggcgcgaagcgccgctacccgatacatcccccggctcgcgctacgcttagccgggctaccgaacttcgcgggttgtgtagcccgggtaaggcgcgaagcgccgctatccggatgcctgtcaaaacagcgtgtcgagctcgtccagcacgttgtagtcgtcatcgaccagcagcaacgtcttccacttatcaaaggtcagacacgggtgcgaggtaccgaacagcagaatatcgccgacctgcacatcgctgcccggcgccaggcgcagcatacaatgctgatccatgatgccggtgctgacgatcgactccgcgcgcagcgctaactcctggccattacgataatgggcgatcggctgcggcagcccggcgtcgaaagcgcagtcgcgcttgccgaagtttaccaccgcgcgatccgcctccggcaccgattgcaccatcgccatcagctccagcgctgatgtaagatcgccggcgagatcgcaggcaatcggatcgcgggcgatcagctcttgttgggcgagatcgtagatcccgcgatcgtgggtgatataacagccagggcggatgacgatacggcagcggcgcggttttgccgccgccagccagatgttgcataccacgtcataccagacggtgcccgcgccggtgagaataaattcgccgtcaaccagcggctccatgcggcaggcaagcgccgcggcctgctgtaacagcgcttccacctgcggctgcggatcgtcgccgtgcagcaccccttcatacagttccagtccgcgtagccgtaaccccggcaggtcgcttacccgctgcgccagcgccagcgcgtcattgacgctacgacagccgcagcgcccgccaggcacgccaagttcaatcagcacatccagcgtttgtccctggtctgcgaagaatgtggagagggcgcgcacgttgacctcgctatcgacgcagcagataaaatccaccgcccgatagtgggcttttagctgcgcgaccacctgcatattggctttgccgaccagctgattaaccatcaggacgcgttggatgccgctggccattgccgcgctagcctgccaggcgctgcccacgccgatcccccacgcccccgctcgctgctgcgcctgaaatatccatggcgtcattgtcgttttaccatgcggcgccagcgatacgccgcgggcgtcggcgtagcgctgcatccatgaaatattattttccagcgccgacttttttagcagcgcggcgggtagacagacctcttccgccagcagattagccggcgcggacatgagggcggatttgtgcgggatgagcggtgctgaatggtatttcataacactatcctttcagggtttataatcggttagtcgctgggtatcatttataactatttgataaatatatttttaatataaaaatgttattcgttttgaataaaagtatcacaaaacgatctgatttttgcgtagttttccactgttttttgcgcttgtaaatggttaacttatcggcatgtcgaaagggagtaattgctatgaaagttgactggcttttcaaaaacgtcacggtgatcgacgggagcggcgggccgcaataccgtgctgatgtggcggtgaagggcgatcgaattatggctatcgccccggcgctggacgttgcggcggagcaggtgattgatggccaggggcgggtactggcgccgggctttattgatgtgcatacccatgatgatatcaacgtgatccgcatgccggagtacttgccgaagctcagccagggggtgacgacggtgatcgtcggcaactgcgggatcagtgcggcgaccgccaccatgcggggggaagtgccggacccgatgaatctcctcggcgagcagcaacactttatctatcccaccgtggaggcttatgcccatgcggtggaggcggcgcgaccgtcgctgaatgtcggtacgttaatcggtcacaccgcgctgcgcaataaccatatggacgatctgtttcgtccggcgaacgagacggaaatcgccggcatgcgcgtacagctacgcgatgcgctgcgccagggagcattagggctcagtaccgggctggcctacgccagcgccttccagtcgaccaccgaggaggtgatggcgctggcggaagagctggcggccgggaagggcgtctataccacccatttacgttcagagtttgagccgattctcgaggcgctggacgaagccttccgtattggccgtcacggcaacgtgccggtggtggtttcgcaccacaagtgcgccggggcaaaaaactgggggcgtaccaaagagacgctggcgtttttcgatgagatgcgccagcagcaggatatcgcctgcgactgttatccctattcagccagctcatcgacgctggatatgaaacaggtgaccgacgagtttgatatcgtgattacctggtctgaagcgcagccggagcaggcggggaaaacgctgcagcagatcgccgatgagtggcaggtgagcctgcacgacgccgcggcgcggctgatgccggcgggcgctatttatcacaacatggatgagcaggacgtacggcgggtgatgcgctatccggtcaccatgattggctctgacgggctgccgaacgatccgatgccgcatccgcgcctgtggggcgccttcccgcgggtgctcggccactatagccgcgacgagcagctattcccgctgactaccgcggtacacaagatgaccgggctgtcggcggcgcgcttccagctggcggatcgcgggctggtgaaaattggctactttgccgacctggtgctgtttgacccgcagacggtgcgcgatgtcgccagtttctccgacccgaaacgaccggcggacggcattgaggcggtgatggtcaacggcgtgatgagctacggcagtgataagaaaattaccggacgggcagggcgtttcctgcgtcgtcggatggactaaggagttgagtatgagtatcaagcgttatggcgtagaaggtggtaccggtaccggcgggcagcacctgccgttcgcgcgggcggtggaagcgggaggctggctgtacgtttccggccagacgccgatgaaaaatggcgaagtcgtggaaggcgggattgtcgaccagtcgcgtctggcgattcagaactgcgtagatatcatgaccgaagcgggctacaccctggccgacgtggtgcatgttaaagtgatcctcaccgatgcgcgctattttcagtcgttcaataaggtatttcgcgagttctttggcgacaacccgcctgcccgcatctgctgcgtagcggacctggtggtggattgtaaagtcgaagtggatgtgacctgttttaacgctgcgcgacaataacgctcgaaacctaaaataaatccctccctttgcgggagggagcatcaaaaaagtgtgatatcggcaccagagtgaataaataaatcggtgccactgggttcgctatgccttttttcaggcatggttcctgttaactcataatattcagcggcacgaatattatttattacgtctggatgtgagccatgaataatatgtcatttatgatttggttttccgtttatgcctgcgcgatgattaccttaggctggtacgtttcgcgcaaacagaaaaccggcgaagactttttacttggcggtcgttcgctgccgatgatcctcactctcggttcgacggtcggcaccatggtggggaccggctccagcgtcggcgccgtcggctttggctacagcaacggctgggccgggatgctttacggcctcggcggcgcggtggggattctgctggtggcatggttattcgcgccggtacgtaaacttcgcttcatgaccatgagtgaagaaatgtcgtattacactggcggcagtaaaattataaaaaacctcgtcgcaatacttatttttattgcctctataggctggctgggggcgcatatattaggcggcggattatacctggcgtgggccagcggcattgatattaatgtcgcgaaaattattatcgcgctggcttttgtggtttatgtcggtattggcggctattccgcggtggtgtggatcgataccattcaatcgatcgtgctgttcgtgggctttattttaatggcgatactggcggttcatcacgttggcggctggaaccatattcagcaggccgtcgatccggcggcgcaaagcctgttcgcggtcgataaattaggcgtgttgccggcgctatcattggcgatggtgatcggcgtcggcgtgctggcgacgccttcttatcgccagcgtatttactcggcgaagaccgtctcctcggtgcgccagtcctttaccattaccggcctgctgtatctgggcttctccttcctgccggcgatcatcggtatggcggtatggaccatgaacccgcagctggagaacagcggcttcgctttcttgtttgccacccaggtgctgccgccggtgctggcgatggcgatcctgattgccggcatgtcggccaatatgtcttccggcagctctgatgccatcgccgcggtgtccattatgctgcgcgacctctacaccctggtgaccggccatatgcccgcgccggagaaagcgattcgcctgtcgcggatcttcctggttctggtgattgcgctggcgctgctgtttgccctgacctccaacgacatcatcagctacatcaccaaaatgatctcgatgattatgtccgggatgtttatctgcaccatgcttggccgtttctggacacgctttaactggcagggcgcggtcgccgcgctggccggcggcgccggggcatcggttgcggtgctggtggatagcgactggctggcgttctggggcaacccgtgtattccggcggtgctgacgagcctggtggcctcggttgtggtgacgttactgaccccggccagcagcatgagccgcgagcaggcgctggagatgattacccgcgagcgtgaaagccgcccaacgccgccgccgctgccgattggcaaacgtcatacctcacgcgggtaaggggcaatcatgaacgagtatattgccgtcgattggggctccacccagctgcgggcatggcggatgcgtgatggcgaatgcatcgacaagctgaaactgccctgcggcgtcacgcgtctgaacgggcagcgcgccgaagcggtatttcagcagcagttggcgccgtggcgcggcgaccccgcgctgccggtggtgatggcgggcatgatcggcagcgatgccggttggcaaccggtgccttatctggcctgcccgctggcgctggaggcactcaacggtcagttatatgaggtggcggaaaaagtgtggatcgtgccggggctgaaagtggcgcaggctgcagattacgacgtaatgcgcggtgaagaaacgcagctgctgggcgcctggcaactgatgcccgcggagtgttacgtgatgcccggcacccactgcaaatgggtgcaggtgcaaaacggcgtggtgcgccagttcgccacggcgatgaccggcgaactgcatcacctgctgcttaaccattcgctgctcggccagcaactgcctgcgcagttcccggatgaagcctctttcgccctcggtatagaaaaagggttaaatcagccggcgttattgtccgggctttttagcgcccgcgccgcgcgggtgttaggctcgctggcggcgacttcggtgagcgattatctctccgggctgttgattggcgcggaggtggcgacattcagcgaacgctatcgcgccagccgcgtggtgctggttggtgagcactcgctcaacgcccgttatcagcaggcgatggcggcgcgtgggttagccgtttcctgttgctccggcgaggcggcgtttctttcgggtatagcgaggatgattgatggacaagattaagctggtggcgattttacgcggcattcaacccgctgaggcggcagatcatattgagacgctaataaatgcagactttcgctatatcgaaatcccgctcaattcgccggactggcagcaaagtattccggcgatggtgcgtcagtttggcgagcgggcgatgattggcgcgggaacggtgctgaaggttgaacaggttgattttctcgctgaagctggggcgaaacttatcgtgacgcccaatacggccccggcggtgatccgccgcgcggtagataaggggatgctggtgtgcgccggctgcgcgacggcctccgaggcgtttagtgcgctggatgccggggcgcaatggctgaaaatctttccgtcatcagcattcggcgcggactatattcgcgcgctgaaagcggtgttgccgccggaggttccggtgctggcggtcggcggcgtgacgccggaaagtctggcgacctggatacaggcggggtgcgccggtgccggtctgggcagcgatctttatcgcgccggacaggccgtggaacgtacccgcgagcaggcggagaggtttatctccgccagtaaaagttagtcccccagcggctgccgatcgacgccgccgcggtggctgtcgagcgccagcttaatacggcgtaatttgccttttgcctggggtttgttggccatcgccagttcggtggccagcacatcgaccatcgccagcatcgcgtaacgggaagtgctgggcttaaagatatagtcgttttcccgtaccagcagcggtagcaccagatccgcctgttcagccagcggcgttccggcgggggtaatcgcaataaccttcgcgccgtactggctggcaatcgccgcgctctcgatgatttcccgggtatagccgcccagagaaagcacgatcaccacatcctgcggcgtcaccgccgagctcatcatgcgtaccagcagaccatcgctctggctgactaccggcagaccgaggcgaaacaggcgatactgaatttcctgagcgcagatggtcgaaccgccgcccatccccagggcgaggatctgccgcgcatcgctcagccagctcaccgcgcgcttcagcgcctcgatatccagcgcccgccggttggtctccagtacgctgatgattgactcatagatcccctggacgccttcgagatccggaacatcgaggataaaccgctggccgaccgcaagagattgcgcaagcttcatcttcagctcgcggacgtctttacagccgagcgcccgggcaaaacgggtgaccgaagcctggctggtttgcgtcagacgcgctatctcggcgatgggcagctccgccgccgccgcgacatcatcgagaataaactgcgcaatgcgtttttcggtcgccgtgagttccacaaagcgatctgttatgcaggaaataatatcgattgaccaggacatacggtaacaacgggtaagttttgaatggtactttgtaccatattgcgccgctgaaatcagtgctgaagtctacaacgccaggcgcatggcgcagcgcgactcgggcggcaggccgtgccgggtctcctgttccctttttgctgccagcccggcgggcagggtcagctcatcgagcatggcgaatcccagacgggtataaaacggcgcattccacggcacctcgcggaaggtggtgagggttaccgccgggtagcccatctgccgtgcgctctcaataacccgctccagcagcatccggccgatgccctgttgctgccaggcctggtggacggcgacttcgacgataaataacgcatcgtcgagcggttcggtcagaataaagccaacgggttgcccggcggctaccgccagcaggctatgctccgtttccagataatcatgatggcgcgcaacgctaatcacctcgctgtccgccagccaggcgagagaagggatctggcgaaatgcctgggcggcagaacgttcaatggcgggcagaagggcgatatcgctctcctgagtcaggcgtaatacggcaccggcagttatagtgttagttttcatcatctcagcatagcagccttcgggagaaaagtatggagctgaccgccgttcccgccacgcagttcagcagcgtgcagttaacggatattctcaacgcctgttttgaagcctacctggtgcctgttacccagtcggtagagggatttgttcagcgttttagcgccgaggggatgagcctggtcgattcccgcgtctggctggccggagatgaaccggcggcgatcgcgatcgtcgcgcgccgggggagtgccgctcgcctggcggcctttgccctgcgcccggcctggcgcggcaaaggcctgggccggaaactgatgcaggagctgctgatgcttttgcaacagcaggggatcgagacggtattcctggaggtgatccgcgataaccatgcggccgtcgcgctgtatcagtcgctgggctttacgcgacgctatgggctctgcggctacctgagtacagaacttctgcccccggtgccgggcgtattgcagctttatcccaccctgtccctgcttcggcgcgccattgaggagagtaacagccagcttccctggctgctggatccgcttaccttcgccactctgccatgtcaggtcgtgacgctggaacagcgcgccttcgcggttctaacgacggcgggctcgcgccctgtactgtcgtttttgtgggtggagcccgccgcccgccgccaggggctggcgcgtgagctgctgaaggcgctggcgcagcagttcccgggcattggtacttcggtgacggtcccggaaacttttacgccgctgtttgccgcggccggctatgccgctttgacactacaacagtatgagatgagcgcaacgatgaatgccctgcggtcggcagggcgttaagatttagtcgttacgcggatcgctaattggctgccgaaccaggaaaatgtaggccagcgcgccgagagcggtcacacagccgcatataaccagcgccagctggaaggaatgggtggtatcgacaataaatccggtcaccaccggtgcaaatgaagcgcagataaagctggcgaaattctgaatactgccgacggaagccgtcattcttgatgccacggcgacgtggatcaatccccagcaggacgttccggcaaaatgaatgcagaacaacgccataccgattaacaacaccgccgcgaaagaggtagtggcatgcggcacgatcagtgtaaacgccgcggagcagaacatcccggcaatgatgcagatcttgcggcttttgatcggtgccatgccgcctttgaccagccagtcggtgacgtagccattgatcagcataccggcggcaccaaacaggaaaggaattgcggccataaatccggtacttttcagatcgaggttatacgctgtttgcaggtagcccggcagccaggccagatacagccacgcggtataattgatgccgctgaagccgagcatcattccccacatggttttgtttttaaacaggctgcgccattcggcaaagctcagcgggtcgcggcgaacgttgacgcttccggcgttaaggtacgcctgttcatcggcggtgagggggagatcctcccggttgcgataaagcatataccagccgatagcgataaagatccctagtatgccgatagtgataaacatccagcgccagcccatcatcagcatcattgcggcaaggattggtgggctgaccgcgacaccgatcgtcgaggcggcgttgaagaagcccattgggcgaccgcgctctttaatattaaaccagtcgttgatcaccttgacgccgcaggggttcattggcgcttcgccgatccccatgccgatgcgcaccaggacgaactgggtaaagctgtgcaccatcccggagagcgcctgaaatagtgaccagaaaaacatacccagccctagcatgatgcgtggacctttgcggtccagcagagggccgcagggcagttgcgcaatgccataggctagagaaaaaaccgataacagcgccccgatttcagtggcgttgagccctaactcctggcgaatcgttaagtttgccacggacaatgaacttcggtcgaggtagttaatcaccgccgccagaaataacagaatcattgccgttgtttgaatctttttaatacgagagctacgttgtagtgtattttctaagggaactgaaaggggttccgctttcccctctttaaagtcggtctgcgggtctatggttatattttgtgattccacgcctgactcctgattattatgtttgaacgccaagtaacaacgaatggtttaaagaccacccacatatttcacagtaaagtaagtcgacttgttttcagcataaataacctttttgagggcgccggattacgtttttggatttgtgctgttgctaatcattttctgtttttaatcggtacttaatgcgccagcgattcactttgcttgatagagttaatcatggattgcttcgcagtgttcaggtggttacgtagcgccaggttggcatccagatcgctgcgacagatgagtgcgctcaggatagtcatatgttcgtcaatagcgatgatattgcgctgtttaaggtcgctttcatcccactgatagtggaagtgaaagatcacggagataatctcaagggattgattaaaaaatatattatccgcggcggaaagcagcagcgaatgaaaatcacgatcgagctgggagaacatactaaagctgtcgccaatgctgtcccgcagagtgcggtggcgctcaagcagggttttggcctgcagccagcgggcatcgctgtccggcagattaagaaagtgttgaagtgcgtgagtttccagcatttcccgcaattcgaacagttgttcggcccaggattgctcaaatttcttcatgttccactggccgcgtttttcgctttcaatcaggttgtagcggctgaatttcagtaaaaactctctgaccacgaccgggctgacgcccgcggcacgcgccagttgcagttcggagaatcgctctccggcgcgtaactggcgttggttaatcatggtgaaaaacgcttgttcaaagagacggttttgttcggccagcgaggcgctggaactatcgaagccgtcctgtacttccggttgacgaaggatctggtagtcgtgattgacctggctcaggacgccgcgctcgcataagtggcaaaggatatggcgcaccgtggtgcggctgatgttatacatttccgccagtgcgctttgcgaggggagcggcgaggggataaagccgcgcgccatgtcgttgatgacctggttaataacattgtgacgaaggttttgtgagcgactcataacgttttccttttttatccattaaaaccggatttaaaacagttttgtgcgcgatatttcacagattttgcaatgacttttactctacttctatttttcatcgatatctaagccaacaaatacggaggcaataattatgacgtcgatgaatactttagtatgtcaggaacctaaaaaattacactgggaaaaacgccagattcccattcccggcgatgatgaagtgctcattaaaataaaggcggtggggatttgcgggacagatattcatgcatggggcggcaatcagcctttttttagctatccgcgtgttcttggtcatgaaatatgcggtgagataattgggctgggtaaaaatattcttaatttgaagagtggccaacaggttgctgtgattccctatgtcgcctgccgccactgcccggcctgtctgagcggccggacaaactgctgtgagaacatttcggtgatcggggtgcatcgcgacggcgggtttagcgaatacctctgcgttccggtaaacaatctgctggtggtggatgatgtcgaccctgaagctgtagcgttgattgagccattcgccattagcgcccacgcggtgcgtcgcgcagcgatccagccgggagatcaggtactggtggtcggcgcgggtccgattgggctcggggcagcggcgatcgctaaggctgacggcgcacaggtggtggtggcggataccagcccggcgcggcgcgatcatgtggcacaacatctcggcctgaccaccctcgatccctccgatccactgtttaccgagcaactgtcggccacgtttgacggttctctggcgcagaaagtgattgacgcgacgggaaatcagcaagcaatgaacaacaccgttaatttaatccgtcacggcggcagcatcatttttgttggtctgtttaagggggagctgcagttctctgacccggaatttcataagaaagagacgacgatgatggggagtcgtaatgcgacagaagaggattttgccaaggtcgggcggctgatgactgaagggaaagtgaccgccaggatgatgctgacccaccgttacgacttcaaatcgctggcggaaatttacgaaagcgacgtgattaacaatcgtcagctgatcaaaggcgttattcatttttagcagggaagctcatgaaaaccttaaaccgacaaaactttccaggacctcagtatccgacccgtgcgattcagttcggcgagggcaatttcctgcgggcatttattgactggcagctggatctgctgaatgagaaaaccgatctggcgacgggcgtcaccattgttcgcccgatcaacaccgtttttccgccgtcgttaaatactcaggacgggctgtataccacggtgatccgcgggttgaatgaacgcggcgaggcggtgagcgaggcgcggattatccgctccgtaaataatgagatcaatccctggcaggattttgctggctacctggcgctggctcgtgacccggagattacatttgtgttttcaaacaccaccgaagcggggattagctatcacgccggggaccggcctgacgatatgccgccggtcagcttcccggcgaagctgacccaattgcttcttgagcggttccgtcatttcaacggcgcagcggataagggctggacaataatcccttgtgaactgattgactataatggcgaagcactgaaggcgttggtgctgcgctatgctaaagaatggcagttgccaacggcattcagcgactgggttgaaactgccaatacattttgttcaacgctggttgaccgcatcgtcaccggctatccgcgcgaggaagcggaaaagctggaggcggagctcggctaccatgatgctttcctggatactgccgaatacttttggttatttgtaatccaggggccgcaggggctggcggaaatgctgcggctggatcgctgcccgctgaatattcgtatcgtagaggatatccggccctataaagcgcgcaaggttgccattcttaacggcgcgcataccgcgctggtgccggtagcatggctgtgtggggtggatacggttggcgaagcgatgcgggacaaagccgttcgccattatgtccagcagacgattgatgaagagattatcccggcgctcgatttaccggccgaggagcttcgtcagtttgccgatgcggtcaccgggcgctttcttaatccctatattcgccatcaattgctcgccatcgccctgaacggcatgactaagtttcgtacccggatcctgccgcagctgctgacgactatccgccaacacggcgcgatcccgccgcggctaacgtttgctctggcggcgctcatcgccttctatcgcggtcagcgtgacggacagacgtatccgctacaggatgacgaagtttggttaacccgctttgctgaaggatgggctcaggtggcgaacggcagcccgctgcatgaactggtcacagaagtcctgcaggatgctgcgcactggggtgaggatctgacggccattccctgccttgccgaccaggtcacgcgctatctggaaatgattttgcgcgcggggatgcgcgaggccctgtcgcggttgtagtcggtttgttgtgcggcgcccgcggattggggcgtcgtttttttttgtgctctgaaccgcaaaaaatgaattaagcgccaacggttggcggatttcccgcatcatatcccttcgtaatggcgaagagggggatgcgatgcgtaaaacggaactgttggcttttttgcaaaatcagaccgattttttcgatccggataacctgagcgaagtctttaccgccagctggctggcccggtgtttcgcgatgcaaagaaataccgccagccattatctcaatcagctggtcgctcaggacgtgctggtgaaaatcaacacccggccggtctattttctgcataaaaaagccttttgccagcagttctacccgctttcccgcagtgagtatgccagcatggcggagttactcgcggagagcgaccgccagccggagcaggcggaccatttttcgttgctgaccgggcatgacggcagcctgcgtaaaccgattgagcagatgaaaaccgcgctgttttatcctaacggcgggctaccgctgcttattaccggcgacagcgggaccggcaaaagctatatggctgagctgatgcatgagttcgccatcgcccaggggctgctggcgcccgatgccccctttgtgagctttaactgcgcgcagtatgcgagtaatccggagctgctggccgccaacctgtttggctacgtcaaaggcgcgtttaccggtgcgcagagcgataaagcgggggcgtttgaggcggcaaacggcgggatgctgtttctcgatgaggtccatcgcctggatgctcagggacaggagaagctgttcacctggctggatcgtaaggagatctaccgggtgggggagaccgcgcaaggcttgccgatttcgctgcggttggtgtttgccaccaccgaagatattcacagcacttttctcaccaccttcctgcgccgaattccgatcctggttagcttgcccgatcttcaacaccgtagccgcgaggagaaggaggcgctaacgctacagtttttctggcaggaggcgcgcacgcttgccgcccggctgcaactaacgccgcgactgttgcaggtcctgacgcagtatgtttatcggggcaacgtcggcgagctgaagaatgtggtgaagtacgccgtggcgtcagcctgggccaggtctccgggccgcgaaatgttgaccgtgacgctgcacgatctgccggagaatgtcatggccgcgacgccagcgctcagcgaagcgatgggccagcaggagccgctgctgatcgagccgcagaccagcctggtctggctgctgcgtgcgcgcgacccggtacaggggctgatctatgacgttcagtgtcgggttctggcgcagtatgaagcggtgctgaataaaaaaacggtctgggaagaggcgcaaaggagcatgggggaagagattgaaaccctcttcgatcggctgatctttgataatcatgactccagtagctcgcagatgctgctgctgatcgctcatcaggttcgggaggagtattatcgcctggaaaagcgcttcaatatccagtttaacggcaactgcctctacgcgctgagccactacctgatccaccgatcccgacagccgcagtccacgataaacaatgaaaaagcccgccagctggaggacttcctggtacagaagtttccgctgctgtatcgcttttgcgaagcgatcctcggtgcgttgacgctgaagctggatattgaaccccagcgtatcgacctgctgctgttagtgctgtggttccacaagaatggcgccatcagccagcagcaggtgacccgggcgataattctcgctcacggttacgctaccgccagcagcatcgccaacgtggcgaaccgcttgctgaaaagccagctctttgagtcattcgatatgccgctggacgtgacgccggaggctatcgctaaccaggtgatggcctacatagagagccatgctctggcatcaggattgataatcctggtcgacatgggatcgctgaacgccattcaccgccattttaatcgtcgcctgagtacgccgatggcgatcatcaacaatgtctccaccggtatggcgatgtacgtcggggagcgcattttgcagggcgttatgctggaagatatcgtccgcgagatcggcgatgaccttgcggttgagcaccagctctattacccgcaaaccgataagccgcgggcgattttaaccacctgcgcgaccggtctgggcgcggcggcgaatctgtcggcgctgttaaaagccagcattcctgaagcgcttggcattgatattgtggcctgcgatgtggagacccttgccgatcccgcgcgacgggagccgatgctaagccgctatgaggtgctggcgatcgtcggcaccctggatccgcatcttgccgatctaccctggatctcgctggattcgctgatctctggcgaagggagtcgtccgctgatgcgcatttttggcgaactggcgacggcggagcaggtcagcgagatcaacaacctgatcctgaaaaacttttcgctgcgccgggtgatcgagtcggtgacgatcctcgatacggctaaggtgatcaaccaggttgagcagtttttgctgcgctatgagcatctggccgggcgcgatgtacctaacgatcgtaaggtcgcgctgtatgtgcatataagctgtttgatagagcgattaattcgtcacgcttccccagcccaatacactggagggcagtgtccggatcgcgagctggctacgctacgcgaggcctttagtgtcatagagagcgggtatagtgtcaaaattcccgttgtagagctctgctacattcacgatatcctgacgcgggaaacggaatttattcaggaagatcaagacttttaacacatctcttcttttttatccttacgttagccgacgcgccactgtttctggcacgtcggttgcaattaagaaagcagtggaatgcgctttcgaggtaaggatgaaacgacactatatttttgccagccatggcagctttgctaacggtttgttgaactccgtggaactgatcctcggtaaacaacccgatatacataccttgtgtgcctacgtggaagaagaggtcgatctgacgcagcaggtggaagcgctagtggcgcgtttcccggcgcaggatgagctgatcgtaattacggatatttttgccggtagcgtgaataacgagtttgttcgttttttatctcgcccacatttccatttattatccggtttaaatctgccgttaattattgacttgctgatttccgcagcggaagacaataccgaaaaattaattaccgaggcattaacaaacgccaaagagagcattcagtactgcaatcaaacgattgccagcgcgatgactatggataaagacttctgaaatgaggaagcatgatgattacattattaagggtagaccatcgattacttcacggccaggtggccttttcctggacccaatatgtcggcgccgattgtattttaatcgccaacgatagcgtccctggcgatgagctgcggaaaaccaccattaagcttgccaaaccgccctcggtgaagctggtgattaaaaatataaatgattctattgaggcaataaaaagcggggttaccgataaatataatttatttattgttgtggagtcggttaatgacgcctggcgtattgccagcgccatcgacgaaataaaaagcataaatcttggcggaataaaggctaaagagggcagtaaaaatatctctaaggcgattaatttactgccgacagaaatagaacagctacaacaactggtgggcaagggcgtcgaagtggagattcgccaggtcccgaacgatcgcaaacagctttttgcggaatgcgtgtaattccggaggacagattatggtagaggctctcttactgggtctggtggcgtttatcgcgcaatcggaatatgccttagggacgtcgctaatttcacggcctatcgtcaccgggctgctgaccgggctggtgctgggggatgtacagaccggcgtcattatgggcgcgacgctggagctggcgtttatcggctctttctccgttggcgcctcgatcccgcccgacgtcgtgaccggcggtattctcggcgtggcgttcgccattacctctggcgcaggcacagaaacggcgttgttgcttggcctgcctatcgccacgctgactttgatcctgaaaaacatctatctggggatgttcattccaatgcttagccagaaggcggacgggtatgcggaacgggcagatctccgcggcattgagcggatgcatttgattgccggattcggcctgtcgctgatgcttgccgcggtggtcaccgtctcattcctggtgggcagcaacgcggtgaaatccctgctcgatacgatcccggaatttatcaaacatgggctcagcgtcgccaccggcatcatcccggccctcggcttcgcgatgctcgccaggctgctgattaacaagaaagtggcgccgtattttttcctcggttttgtgctgatggcctatttgaaaatcccggtgaccggtatcgccattctcggcgccatcgtggcggtagtcatggttaacgtcaccgcgttgaattcacctcgtatcacgacagaacaaggagtcagcgatgacgacgaagatgatttctgaagagaccctgcagccgcaggcgcaggaagaaacccggattacgccgcgcgatttacgccgggtgttctggcgctctttccagatggagttctcgtggaactatgagcggcagatgaatctcgcctttgtttacgcgttgatcccggtgctgaagaagctctatccgcgcagagaggagctggccgcagcgctgaagcggcatctggtttttttcaataccacgccgcatatcgtcaccctgctgctggggatcaccacggcgatggaagagaaaaacagtcagcagaaaaacatggatgccactgcgattgataacgtcaaagcctcactgatgggaccgttagccgggctgggtgactctttcttctgggggacgctgcgcctcatcgccaccgggatcggcaccagcctggcgctgaagggcaacatcctcgggccgatcctgtttctgctggtgtttaacgtgccgcacattctggtgcgctggtgttttacccgctggggctacgtactgggcaccggggtcctgcagcggatccagaagagcggaatgatggcgagcctgacctacggggcgtcgattatcggtctgatggtagtcggggcgatgaccgcttcaatgatcgatatcaccattcctctctccttcggcgccggggaggccaaaacccaggtacaggacattatcaacgacattctgccctgcatgctgccgttggtgagttttggcatcgtctactggctactgggacggaaagttaaaccgctctcaattataggcggcatggcgctggtgggcattctgggttcgtggatcggattgttttaacgggagtgagctatgcgaccaacaatgatgacatatatcagtgaagagccagcctgcctggcgcagatcctgcgcgactaccgacaaaagctagcgccgattgaaaccttcgcccgccagcacccggtacggcggatattattgctcgcgaccggatcgtcgctgaatgccgcgctgtgcgcgcgctatttctttgagcaacgcttcggtgtgctgcttgacattaaagagccgtacaacttcacccattacgacgcgatcgacccgcatgccgatctggtggtggcgatttcacagagcggaaaaagcgcgtcgacgctggaggcgatgcgtaaggtacaggcttccggcaagtcggttttcgccatgacctcagatccgcaaagcccgataggaggcgctagcgatggcgttctggatattaataccgggatcgagagcgtagggtttgtgacccgcggctttagcgcgacggtgctcaacctgttgctgatagcgctgatcattgctcgtaagcaggagaaagccagcgaggtcgaggagcagcactatctcgctgaattgcagcggctggtagcggcgatcccggaggttatcgtccgcacctcgcgctttattgaccgccatagcgaaacgctgcgcagcggcgagcgctttgtcgccaccggctacggcgcgctggttggcgtggcgaaggagttcgaaaccaaatttaccgagacggtgcgcgtgccttccagcggctttgagctggaagcctatatgcatggcccctatctggaagccaatgcccgccatgtgatgctgtttattgaagatacgccggacgcgcgaacccgggcgctgcgcgactatctggcgccgtccattggccgggcctttaccctgacgctgggtgacgaagaggatgctcaaacgctggcgctaaactgtccgtgcgagcatcacctggcgcctctgctgctgattgtcccagtgcagatgctcgcctggcataccgcaggactgaaaggcatcgatctggctaaacgtattttcgacgattttgaccgcgtcttaaaaagtaaaatctgaatattcaggagaaaactatgttgggttttaatcaggacgagtacctgaccagtgctcgcgagatcatcgctgcgcgtaaacaggctgaaaccgtagccgacgatatttatgacagcggctgtagcgcattattttttgcttcggtaggtggttccctggcgccgatgatggcaattaatgaatttgccaaggaattaaccagcgtgccggtatatcttgaacaggccgcggagttaatccatcgcggacataaaaaattaaataaagatgcggttgtcgttacgttatctaaatccggcgataccaaagagtcggtcgccattgccgaatggtgcaaggcacaggggatccgcgtggtagctattactcgtcacgccgactcgccattggctgccgccgccagctggcatattccgatgtgccacaaaaatggcgtggaatatgaatatatgctgctgtactggttattcttccgcgtcatttttcgtcacggcgagtttgctgattatgcgcgatttgccagccagctcgagttactgccggaaaatctcctgcaggcgaaacgccagttcgatccccgagcggatagcattgccgcgcaataccatgactgcgactatatgatgtggattggcggcgcggaaatgtggggcgaggtctatctgttctcaatgtgtattctcgaagagatgcagtggaagcggacgaagtcggtgagctccgctgaatttttccacggcaccctggagctgctggaaaaagaggttccgctgtttctggtgaaaggcgaggggagatgccgggcgctggacgaacgcgtcgagcgttttgccgaaaaaataactgagcatctggtggttatcgacccgcgcgactatccgctgaacggcattgatgacgcgttccgctggattatggcgccgtgcgtggtgtccaccctgctggtggaccggctggcggcccactttgaacaccataccggccacgacctcaatatccgccgttactaccggcagtttgattactaagccgtgttgatggcggccagccgggctggccgccatgctattctccgaggcgcttcccagaaaattgtcgtcaaacccaaccgggtaaaaaccgatgatagagtccggcttaccttctctttcaggcaagcggatggccatgaaaaaacggatgacctcgacgccgcacgatgcggtctttaagcgatttcttcgtcacccggagacagcgactgatttcctcaccctctaccttcccgaagcgatccttcagcggtgcgatttctctaccctgaggctgcaatcggcgagctttattgatgaggatctgcgcgcctggtattcagatgtcctctggtcggtgcagaccacctgcggcacggggtatgtttacgtggtgatagagcaccagagctcaccggatagccatatggcctttcgcctgatgcgctatgcgattgccgcaatgcagcgccacctggatgccgggcacaaaacgctgccgctggtggtgccgatgcttttttatcacggtgcaaccagtccgtatcctttttccctcaactggctggatgaatttgccgacccgcagctggcgaagacgctgtatggctgtccgtttccattgatcgacgtgacggtgatgccggacgatgacatcgtgcaacatcggcgagtcgccttgctggagctgatgcaaaaacatattcgccagcgcgatctcagcggcataacggagtcgttggcggccgttgtgatgctgggatacactaaccgtcggcagttgagaatgctgtttcactatatgctgcagtacggtaatacggccgagccgggcgtgtttctccgccggctggcccgccgtctgccacagtatgaggagacattgatgtctatcgcgcaaaagcttaagcaggaaggtcggcaacaaggccgactggaaggccgggaagaagggcacctggagggcttgcaggaaggcagccgacgcgaggcgctgcgcattgccggcagtatgttacagaatggcctcgacaaagagatggtacagaagatcaccggactgtcggctgatgaactacagccgctgtgtggttaacgtcctgccacgacaaccgctgcccggcgcgaaaattcgccgggcaggattgcgttagccttcgcttttcaccactttgatctccaccatgccgatccccaactgacgcggggagtggccgaggatattgccctcgttagtggtttgcgggtccggcggggtgatgatcagcgtgttgctgcgcgttgggttgtcaaaatgcagcgtcgtggtagtcacgtcattatccagagtgagcacttgctcactttctccaactcgcaccggaatcggcttattagcgtttgggccataagctttggcggtgatcaccagatcaaatttctccggcagcggctctttatattcaatcttcacgtcgctgcccaactgagcattggaccaccgcccccacgactcgggacgcgaaataccgctgaactgtttaacctcttccggggcgccagcgacgttaaacacgaagctgtcggccttatagcgaatatcgttgtcgacaattttcagcgtatcgacgttgcccttatagcgctccatatcgataagggtgtccctgaaggcggtcttgccgtgccactgcggcttatcaacgtgctggaccttctgctcaccccccagctgtccctgcgagacgcaccagtcggtggagagcgccagctcaggcgaccacagctggcccattttatagcagcgatcgacccacacgaaattatcccgtggcgcgaaatcggccagctggaagcgcagcggcgcagagtattcactctccggcagcggttctacgcgctggtcagatacccgcagcagcagcggcaggcggaaatggctgccggagaaagcgatcatatttttttgcgagtcgatggtgaaattcttcatttctttggggaaattccacaggcggatcacgtcaggcttccatgccaggactttctctttcatattcatgaaaataccggagagcgactggccggagaggctgctacgcccgaggccgatatagttatcgccgccgagaatatccagcaccgtcgcgccgttatccatggtgttgcgtttcaccgccagggtctcctgctgcggtttatcgccgcgcaggacgaagaacagattgctgcgatcgtgcttgttgagataatcccaggcgctgttcttcatggccaggtgatcggaagagaccacgatgaccgtgtttttgaaatagggtgaggctttaatcttttctatcagcgcggcgatatgttcctgactgcagctaacggcgctgaaagagaggtttttcttgccgtccacatcatagcgtttacgctcgcaggtgcgtgagataaaaccgtcgggatggtgggtatccaccgtcagggcgaagagcgagaagcgtttcccggactgcgacagctcttcgaattttttccaggtctcgtcgagcacagtgtcgtcatagaagccccagtcgttgcggtaggtaggatccgccaccgtagtttttagctcttccgccccgtacagatgatcgaagccgtgggatttaagaaacacgtctttgccggcaaagcgcaggttagccccctgcacaaagtaattctcgtaaccggagttcttcagaatatcgccaaggcaaatattctgtggaaagaagctggagactgaggctgaggcattaccttcgaacggcgcgaacagcggaatgccgcactgtgaggcgaccatgccggcgatagtgtaatcggtccccggcagctgcatggtattgctgaaatcaatggcctcatctttaattctgccaagctcaggggtgaggttggggaaggcgtcgttatcaaaataggtgcgctcgagactttcgccatagatatagaccaggttcagctgcggattgtcgatttgcttcgacggctctttatagtacgcggcaaagtctggatcgccctcgcgtgactgggatttcaccagctcgctgatctgatggaaggccgggctggcatcaacggaggccagcgccagcagtagcgccgccaggctgtaaccgacgtgatgaggatgatgccgacggcggcgcagcacccagccgagggcgccaaagacggcgaccagtgcgacggccacgccgacccccggcagtatatatttgccgatcccggcgccggtcaggctgttggtcagagtgtagagtaccgcgtcgttgatgccgtcgccggtgaagtagtcactggcgtagagggtgatattcagcaccacgaacaggcctaacaccgtgagcgtggcggcaaaccaccaggtgttacgacccgctttccaggcatacagcaccaccgaagctaaaaataaggcgatggataacaactctgacacagctcatcctcattaatgccagttatcggctggcagaacagattacttttcaagccccactgtaattgcagcgccatcttgctgcaattctagcgtcatgaaagtgtgcagttattcagaattggtttagaagttgccttttttgatcggcatcgcatcgggtgaaatgggaaaacggaacaggaaaactgcaaaaaaaagcgtttcaggccgcggcgccgccgcgaaggcaacaaatgcggccttgtcagtcaggatcaggagaggaaattaacaccctgttttaagaccagatcgcaggctttggtttttacctgtttcgccagcgagctattgccgagcgtattcaggtccaactgctggccgtttttgctgttgagcagcccctgcaggccatccagatagctggtgtcctgtttttgtttttccggcgtgctaagccccagtttatccagcacctgatttttgacgttatcggcgctggtcacggaggccagcttctgtttcgcgcaatatgacaggatcccggccgcattattcatgctgctggcggtcagggattggctgctgccgttaagcaggctggttagcgaggagacggacatgccgccgctggcctgggcgttactgccgctgagctggctggcagcgctgttaagggaatcctgccaggaggcggcgtgggcgccagagagggtaaacgcgctaacggcaagcgcggcaataacgctatttttaaacgatttcatagacggactcataagcgtgactgaataatcgctttagtataacgccgtcgtcgcccggaaatctcttaatactccttgcctgtaacgcggtgccggtaactttcccaattgaagataacccacaggctgttgccgagccgcatacggtccatcacccgctcgccgagcagtttgttcatctcttccatattgctgttggtgagcatcccggtaggtcgtttggaggatgagcgccggtcaactatctgattgataatgaccttttcatagcgagactccgtctgcatcccaatttcatcgatcaccagcaggtcgaccatgctgaggtcgttaagcaactgttcttcgctcgtttcccggttgccgaaggtatctttcatcgccgacataatatcggccacggtgatgattaagaccgacttcccgcgcagcagcagctcgttgcaaatggctgccgccaggtggtttttgccagtgcccggtttaccggagaagataaagctggcgatattgccatcgaactcttccacgtactggcgcgcccgggcgagcgcattcatctgcccctcgcactcgacgcgatagttatcaaaggagcagttctgatgcagcgggcggatccccgagcggttgaaggtgcgctgcattttcatcgcgcgattctctcgctccagcgcttcggaacgcagccggccttgctctttttgccaggccagcagctcttcgccggttttaaacgccggttcaatatgtgccggcatcattttctgcaggcgtttcatcaggtcgccaacgtttttcatgctcatcctcggaaacctcgcggaatatggctgtcgggttcgctaacgctgttcacatcgcgcttcggctgtccgccgttgctggcgcggctgatttgcacgctacgcgccagcttctgctgccactgcacgtggtgaaagactttaccttccgcctgccagtaagcgacgaaagcggccagctcttcgggggtaaccggctggctcagggcaatgccccacagcgcggccaggcgctgaaaatcggcgtcaggctgccatccggcgtacatagcaaatttgcccatcggcaccgcaaccggcgccgcggcgggctcctcgaaaaactgcgggtcaagcgcgatgtcgctgccggggcgcgccagcctggcttccagctccagcagttgcgccagccgcgctggcgtcagcgcatagaatgccggcgcgttattggcaaaaacggcaacggtgccgtcagtcgattttgccagcagcgccgcgtgctgctggaggaactcttccaggccgctaaaatgggaggttaaaattcgcgaagacataactctatctcaactctgaactgcaaagagtggggtgatctgcacatagtagcacagaggccatcgcggaaggagcgtcgcggattaaccgcgacgtcggggttagacgcgaggacgcttacgatacagccacaggccgggtatcgacaggccaatcgaaagggcgcccacaatcgaagaggcctttaaaaaattgctcagcagcaaaatcatcatctcttccgaataaccaaaatgactgatttttaccgcggaaatcatcgccgtgtaggctgagatgccaggaaacatcgggatcacggcggcgacggtaaaaatcttcggatgcgccagataccagcgcgaccattgaatgccaatgctgcccaccagcagagcggcgagaaaggtggcccattcaatgttaaaaccggcgctcatcatgatcatacgcgagccatggccaatcgcccccagcagcgcgcaccagcgcagagcgcgctgagggacattaaagaccatcgcaaacccgacggcggggatcgccgccagcagcatgtcttccgccagcgcaaaaataaatgagattatgcccatccgcgcagcccccatacggtcatggccatcaccacgccaatgcaggtggcgagggttagcaggctggcaatcgcccagcgggcgagtccggtattgatatgccctttaaacatatcggcgacggcattgattaatggaaaacccgggaccagcagcagaacgctggcggccatggcaatggtcggcgtgctggcaaacgccgggaggcgcagcagcagcccggagatggtggtggcgacaaaggcggtgatgcagaagttgatctgcggatgcatggagcgatgggtcagcatctggcgaatgtacatggctaccgtgctggcgcagaagctgaccagcgctccatcccaaccgccgttattcagtttgcagaaacaggcgcaggaaagacccaccatcagcaccagcagccagcgcggatagcgcaggggaacgatctgcgcaaaacgcttctcgacgtcgcgatagtccagcagcttatgctcggcgaggatcacaatgtgctgcacttccgtcaccacatgcatattaatgccgcgatcgacatttttgcgcgtagaggtaagacattcgccatttttaatggtggtcaggacgatggcattcgaagagatggcgctttcaacgctgtccatccccaacgccagcccgagacgtgttgacagttcctccaccagcgcactctcggcgccgtgctgtaacagaaaaagaccacactggatgcataaacgtgtgattgcccgctgctgtgtccgatcaacctgcatacttcctctattgttcacgacgcctggtatctgccgatactttaacctgaagcgcagtggcggctgagggggtgggatcaaataatgtgcaaaaattcccagtctgcggggcggcagaatttgaagcatcccacacttttgccagtttggtgaaaagtgcaatttttgtcgccattcatcccttctttttccccactgacttatcaaaaatgcagaaaagcacttttattaaacaaaaattatacaaataattaaccctgcaagagtgagacatccctatgaagacacaggtcgcgattattggcgcgggcccctccgggctgctgctggggcagttgctgcacaacgccgggatccataccgtgatccttgagcgtcaaacgccgcagtatgtgctggggcgcatccgcgcgggaattctggaaagcggtaccgttgatctgctgcgcgaagcgggcgtggcgcagcggatggatgccgaaggcctggtgcatcatggggtggagtttctgtttgacggccagcgggtgcccgtcgcactgagcgagctaaccgacggtaagagcgtaatggtttatggccagaccgaagtcacccgcgatctgatggctgcccgggccgccagcggcgcgccgatcgtctatggcgtgagcgaggtggctatccatgacgccaaaagcgaccggccgacgatcacctacctcagcgaaggggaaacctgccgtctggagtgcgattttattgccggttgcgacggtttccacggcgtatcgcggcaaagtattccagctggcattttgcagacctacgagagcgtgtggccgtttggctggctaggcctgctggcggatacgccgccggtcaatccggagcttatttatgcgcaccatcagcgggggtttgtattgtgcagtcaacgctcactgactcgcagccgctattatctgcaggttccgctgagcgataaggttgaagcatggtcggacgagcgcttctggcaggagctgaaaagccgcttgccggaggagctggcatccaggttagtgactggtcacgcacttgagaagagcattgcccccctgcgtagcttcgtcgtggagccgatgcaatatgggcggttgttcctggtgggggatgcggcgcatatcgttccgccaaccggggcgaaaggattaaatctggcggcatcggacgtgaactatctgtggcggattctgcgcgaatactaccatcgtggccgcagcgatctgctggcggcctactcgcaactggcgctggatcgggtctggaaaggggaacgctttagctggtttatgacccgcctgctgcatgattttccggatcagaacgcgttcgacgctaaaatgcaggccgccgaccgccgctactatctgggctcgcgcgccgggctgaccaccatcgcggaaaactacgtgggcttgcccatggagcgtgtcgcctgaattaagaggagtcatcatgccgttcgttcaaactgtgcccgtatttaagctgtatggcgaagagtgcggctggccgacgccggacctgctgcactgtgagtcgattttacagcgcagcagcctgtatcagtggcatattcgcgtccatcagcatgcggaaatggtccagcttctctatctgcatcaggggcgggcggagatcgaaattgaaggcgccaccgcggtgatgacggagtcctgcatccaggtggttcccgccctctgtattcacgggtttaatttttcacccgggacgcaagggtttgtgctctctctggcgctgccgctgctgagccggtttgaaaatcagttcggtcgccctctggatgtgcttagcgtgccgcagtgtgtgccggtgggccgttctcgcgggcgcatgcatacgctgttttcagcgcttcgcgaggagtactgcgaagagcacgatgcgcgagaaatgatgctctattcgctgctggggacgctgttggtctggctgaaccgacagtgccatcccgcgtcccccgcggaagataaagcggagcggaagcgcagcatgatgcgccacttcgcccgccttatcgagagccactaccgacagcatctcccgttggcggagtatgcgaagctgattggactgtcggttacgcacttaaattatttatgtcgtgagttttatggctgtagcgctcttggagtattgcatcagcggttgatgcttgaagcgcgacgcaatctgcagtacacccgcatgacgattacacaactctctgattatttggggtttagcgatgcagcctatttttcgcgttttttccgtcgctatagcggtatgtcacccaaagcatttagagaaacaattaaagataatgcttcataatgttcagtactgaaattatttttgctaaataatgtttttatcttttctaatttattggcgcaggaacgtctgtgttaatattaatcgcaagtatacacggcaataatattttacacggtatgaccacggttcggtcgttacgtatatcgtgtgcgcaggccatgaatatgattttaatattcatccaggaaatgatatggcgataaagtcgctcgccgatcgtttgcaggcaagcgaaggaacttcgacaggaagcggaggtgttatgttaccaggacaaggtaagtttggcgtcgttattagtaaaattcccgtcatgcaatcagggttaaaggtgatcttcaatgagaacctccctgattacgaactgagtttttgtcgttctcatgatgagctcacccttttacaactgcggcgggcggtgctggttgtcgcggatatctccggcgagattgcgcacccccgagccgtctgcgagcgttattactccctcatgactcagtaccgtgatattcactgggtttttatggtcagcgacagcctctatccgttggccgttgagctattaattcgtcctgaaagctcgttgatctccgagagcgagccggttaaccggctgattgaggtgatttgcgccggtagccgtgcggctgaacagattagccgtacgctgtttgccggggatgaggacagcgatttcgcaagctaccactctgcggcgatgctcactctttcagagcgtaaagttctgcgccttctggcgaaggggtggggaataaaccagatcgccgcgctgttgaaaaagagtaataagacgatcagcgcgcagaaaaacagcgcaatgcgtcgcttatcgctacgcagcaacgctgaaatgtatgcctggatcaacagcgcgcagggaatgcaagagctgaatatcaattcagcttacggggagcaaatggaatggaaaaaaatagtacaacccgccatgtcgccatcgtagaaaaatgcgtgatgacggaaatggcatggcgctatatctttagtcgtgaagataatcgccgttatcatattcatctgtttaaaaatgtcagtatgctcagggcggcggaaataccgtttccctggtcaaccattattttttctctttcgggaagtcgttcttcacgagccgagagtctgctctttgttcatgaaatggcgcggtgccggccggaagtccaaacgattattctggctaataatgaaagtgaaatgcacctgatcggccatcttatgccggcctgtttgcacggcatactgaataaatccgcgccgcgacgcgggctacaggagcgtttgctgcagctactggacaatcatcatctcagcggcagcgaacaattttgcgacagagaggcgtgcaacgatccgctaagcccgacggagcacgccatccttcggtatatgtcgtggggatattcgctttctgatattgcgatacagctcaaccggaatattaaaacgatccgcgcgcataagtttaacgccatgaccaagctcggagttcgctcagacattggtttattaaacgcggcggatatcctgttgcatttaccgctcaatagtacgacaagcgccgttaaacaggtagcgtaatgcggctataaacacacatctacccatgttgcatcggtgagctgcgccatgcgttctggttcaatgcgaaccgcgctatggatggctcccgctgcgggtagtacttcctgataatgtctgagagagacgtcgcagtagactgccagcggattttccagaccaaacgggcaaacgccgccgaccggatgaccggtccaggtaaccacttcatcgctgcttagcatgcgtgctttcgcgccaaaggtctctttcagctttttattatccagccgcgcatcgcccctggcgacgatcagtacaatcttatctttgatcttgagcgacagcgttttggcaatttgccccggctcaacgttgtgtgcggcagcggcaagtgcgacggtggcggtactctgatttaactcaataatttcgatatcgggggcgtgttcggcaaaaaactgccgtacagactgcagactcattggattctcctgatttaagcctggttaaatctgtcacaagcctggcggagtgtaaatatcagcgcggacaatccagattctttctattttgtcgatctccttcacaatcgccgtaaccggttactgtaaccggttgcggttatctgcattgagatgaatactggaacagtcacttctccttttatttataacaaaagagccgtgtatgaatcgttgcctcatgagcagtatagccggttgcacaatccgccagcggcctgctgcgtcaaaaagcggtcatcgtaacggcagggtaatcgttgttgggccagtatcaatagcctgtcaggagggctactatgtctgctaaccatgctgcgtttaatttgatatttcgctttgtagaaaattacataagccccatagcagggcggatctcgtcgcagcgccacgtcatggctatccgtgacggatttatctcagcgatgccgtttatgatcgtcggatcgttcctgttagtgtttgcttatccaccgttctcaccggataccacctggggttttgcccgcgcctggctggatctggcgaaagagtttgaggggcgtattctgaccccctttgatatgacgatggggatcatgtcgatctacatctgcgcggcaatctcctataacctcggtaagcattacgagaaatccaatcagctcgatccctttatgtgcgcaatgctgtcgatcatggcctttttgctgattgccgcgccgaaaaccaatggcacgctgccggtggatagcctcggggggaccgggatctttaccgccattctggtggcgatctactgcgtggagatgatgcgtttcttgaaagcgcacaacattgggatccgcttgccggaccaggttccgccgatgatcaaaaactcgtttgatctgttgatcccggtgctggtggtcgtgctgacgctctatccgctgagcctgtttatccagcaccattttgacatgctgatcccgcaggccattatggccattttcaagccgctggtttcggcagccgactctctgccggcaattctgttggcggtgctgatcggccacctgctgtggtttgccgggatccacggtgcggcgatcgtgtccgggatgctgcagatgttctggctgactaacctcggtatgaaccagcaggcgctggcccaaggcgcgcctctgccgcatatctttatggaagcgttctggaccttctttatcgtggtcggaggttccggggcgaccatgggactggtgttctgttatctgcgcagccgttcagcgcatttgcgctccattggtcgtttgagcgtggtgccaagcctgttcaatatcaacgagccggtgatctttgggacgcctatcgtcatgaacccagtgttctttattccgttcctgctggcgccgatggtgaacgcggtgctggcctgggcggcaatgaagctggatctgattggccgcgtcatctccgtcgtaccatggacggcgccggcgccaattggcggcgcctgggcgctgggctgggatttccgggcggcgattctggtcattgttctggcctgcgtgtcggcaatcatctacttcccattctttaaggtatatgagaaacagctgcttgctcaggaagcggaagaggccgagcgggcggagcaggagagtcaacagaccgcataaatagcaacgggcggtaaaggccgcccgttacttttcaggtaagtggtaattatttaagcgtacagtcgccgcactgttggacatccggcaggcgatagcgctgacagcaggtgcgtcggactaactgcccttcacgcagcatcaccgttcgccacagcgggttatcctggccatcggcgagttgtttttcaaaaaaacagtgctgacgtagcgcggcaagccgctcatcacccagcagcgcgcgcatttccccaagataccagttaatcagatagccggtattgctccagataagtttgctattgatttcgcccgtcgctgccagcgcctcaacaaccggctgcagggtgcgcgttaccagggcatccattcgcgcctgcggtgaaagcctctcgatgtcggcatcgctatgcacatcaatccagaagcaggccgcccggccgctttcatgaaactcgacatggaaatgttctggcgccaggctgaggccttgcggttcattgagcagcgccagcatcagcggcggcaccagcagaccgatataccattgcgcccagagcgagagcagaggcttctgttcccgaggcagcgtcggctgatgacgatagatatgatcggaccaggtggccagcagggagcgcaaggcgatgggttgcgaccattcggcaagcgttaacgcgtgccgtggggcgggttcgtcaagtcgcaggaaatcaagcaggtgtgggcgcagggtggcgattttttcccgaatactctccgccagggcatgctcagccgtcggcaaaggagcccgccagataagttcatcgctgagaggaagggaacgccaggccattcgatttccagatacaaatctaaatgataatgattactgatattagttgcttgcaggcggcatggcaaggcttttatcggcgccgcgatgtcgcagcgcgcgcaggtcaactggcaagaataatgttgcggcctttatttttggcctcatagagtgcgccgtcggcgcgcgccagcgcttgttcaatgttgtcattaatgagcggcgtcaggccaatactgatggtgacgttggtggcgacgctttcattaaacatatgcgggatcttcaggtcatagacccgctgacgtatacgttcggctgtcttccaggccgtttcttcgctgctattggtcagcagcaccataaactcctctccaccaaagcgggcgacaatatcgcgtgagcgtacagcgttgcgaatggcagcagagacgcgaataagcgcctggtcacccatcatatgaccatagtgatcgttataggccttgaagtgatcgatatcgaggagcagcacgtagtggttgtcgccgtccagcgccagcagggtatcgaggcggttctgcagtccgcggcgattatacaaaccggtcaggggatcgagcatactgagatcgttgagcgtattgcgttcatgcatcagtttatccattaaaccctgcgtaaaggcatcgctgcgcttctggataatattttgcagggtaataccggctataggcagcataaagcagtaagtcatacgcaaccattgttccccctccgccattatcaggcaggcaaggaaagttggtaaagagtggagggtaaaggcagtgatattattggaaaaagcgatggtgccgataaacagaatgcttaatagggcgatcaccagatagttaaaatgcggcggtgtcaatagcatcgcttttgtcactacgtgccatgcccatagcatgccaaataacaacgagatagtgggaatatttattttcgattgcggccatttccagtgccagagcagcagcagcccgctgcagacgacgatcagggcgcagggcagcgtaaaacgaactaccgtaaataggggggtgaccagcgacagcgaggaagaaatgaaattaagcagtaaaaaaagccgtaaggaatattgatatttttgtgcgtagtgtgctcgccaggtttgtgcagtcatatcggaagaatcattattagtcgttaaatttcaaaatgatgaaagccaaaaatgaagagtctgataacaatgtgcaaaaaaaggttatttgcaaaataagcaaaatatttaatatatatcgataatccgcttaatttatcaccttcatgaatgtatgtcattaccgcgaacgtaaagaaaaaggggcagagcacgtcgcaaatgacaaatgataaagattatcatatgatattggttatcattatcgttgtgagaggtgaaaccatgctgcagcgagcattaggaagcggctggggagtgatgattcccggcgcgctaattgtcgctctcgggtatgccggagtgtcggctgacgtatggcgggtactggtcgcggtgggcatgctgatgtccgcggcgatgatctggcatcgtcaattgcgccattttatcctgctgccatcgtgtgtcgcgttgatcggcggaataatgctgatgattgtggatattaaactgagaggataatgccgggagagggaagaatattggtgcgaggggggggacttgaacccccacgtccgtaaggacactaacacctgaagctagcgcgtctaccaattccgccaccttcgcacagtattctttctttgagatattgcctcgttggtgcgagggggggacttgaacccccacgtccgtaaggacactaacacctgaagctagcgcgtctaccaattccgccaccttcgcccagtgcgagcaatatcttcgtggattatggtgcgaggggggggacttgaacccccacgtccgtaaggacactaacacctgaagctagcgcgtctaccaattccgccaccttcgcataccatcgatactctgaaagtatcgttaccacggaggcgcattctagtggttttcggcgacacgtcaatagttaattatgcaggttgtatcgattgctgcaaaaatgggcggatttgcccgcgggaagcgccagcggtaccaggagcgggccgccggcgtgaaaagacgattattttttcgcctgacgggtcatgatggtgcgatagaccttaaagcgcccggtctgggcgatcacctcatggaagccgaacgtctcatccagcacctgcggatacggcaggaaggcgttggcgacaatgcgcagctcgccgccgctgttcagatggcgaaccgcgccgcggatcagcgcctgggcggcttcgagactggtctgcaggccgtcatggaatggcgggttggagatgatcatgtcgaagcgaccattgacctcggagaagacgttgctggcaaacacatcgccagccaggccgttggcggcaagcgtcgcgcggctggcttcgaccgccggggcgctgacgtcgcacagggtgaggcgcactttcggtgaatggctggccagcgcggcggccagcacgcccgcgccgcagccgacgtcgagcactttccctttggtatgcggctcgagggtggagagcagcagctggctgccgacgtccagaccgtcgcggctgaagacgcccggcagggttttaatcgtcagattatccagtgtgtattcgccccagaatgcgtcggcgtcgaaggtcggctgcttttccagacggccatgatagaggccacagcggcgggcgctatccactttgtttaatggcgcgtattcagccagcatctgctccgcgctgcggacgccgctgcggttttcaccgacgacgaaaatgtcgcttcccaccggcagcagagagagcaggttcatcagctggaactgcgcctctggtttgttctttggccagtagtagatcagggtgtcgcattcggcgacgtcagcggcctcagccactaagctaaaacggacggtgtcacccatctggcggttgaggacctgccagtggtggaactgttgggtgtgggcgcggctggccgcggtatccagacgcgcaggcaggtcatcctgcaggtcaccggcaaacagaacgcgggcggactcgaaatcatcactgtggcgcagcaagacttcacttgccggggtaaaagcggacatgaaacactccttcattaagactggcgccgattatagtagtttgttggcgcagatacgacggatttgctatattgcgcgcttgtttaacaggagtgtttcgctatgacatcccgacgagactggcaattacagcagctgggcattacccagtggtcgctgcgccgaccgggggcgttgcagggcgaaatcgctatctcgcttcctgaacatattcgtctggtgatggtggcggaaaccccgccgtcgctgacagagccgctgattggcgacatattacgcgcgctggccgtgacgccagatcaggtcctgcagctgactccggatcgggtggcgatgctgccgcaggacagccgctgcaacagctggcggttgggcacagaggcgtcgctgccgctggcgggcgcccaggtgtccacccccgcttttgatgaactccagaccagcgcgccggctcgcagggcgctctggcaacaaatctgcgcacatgaacacgatttctaccctcagcacggctgatttaaccaaagcctggcacatcgaaaaacgcgcccacgctttcccgtggagcgaacagactctggccagtaaccagggggagcgctatcgcaactatcagctgtcggtagatggcgaaatggcggctttcgccattacgcaagtggtactggatgaggcgacgctgttcaatatcgccgtcgatcccgcgtaccagcgccgcggcctggggcgagcgctgctggagcatgtcattgatgaagtcgaaaaactcggcgtcgtcacgctgtggctggaggtgcgagcatccaacgttgccgccatcgcgctgtatgagagcgtaggtttcaatgaggcaaccatccgccgcaactactatcctacggccgacggacgcgaagacgccattattatggctctgccaattagtatgtaacacaaggtgatacgatgaaatgggactggattttctttgatgccgatgaaacgctgtttacgtttgattctttcagcggcttgcagcggatgtttctcgactacagcgtgacctttaccgccgaagattttcaggactatcaggccgtgaacaagccgctatgggtggattaccaaaacggcgccatcacctcgctacaattacagcatcagcgttttgatagctgggcgggacgtttgaatgtgccgcccggggaactcaacgacgcgtttatgaatgcgatggcggaaatctgtgccccgttgccgggcgcggtctcgctgctcaacgcgctgcagggcaaggtcagaatgggcatcatcaccaacggctttacctcgctgcagcagactcgtctggagcggacaggtttacgcgatcactttgatttgctgattatttctgaacaggtgggtgtcgccaagccggacgcgcgtattttcgattatgcgctggcgcaggcgggtaacccaccgcgctcgcgggtgctgatggtcggcgataccgccgagtcggatattcgcggcggcgtgaacgccggactggcgacctgctggctcaatgcgcatcagcgcgagctgccagcggacctcgagccggactggacggtgacctcgttaagcgaactggagcagctcctgtgtaaacactgattgcctcccccccgttgatgggtaaaatagccgcaatttttcgtattccacatgcgtggcccatggccgcgtttacttagaagattaattatgacgttgtctccttatctgcaagaggtggccaaacgccgcacttttgccattatttctcacccggatgccggtaagaccaccatcaccgaaaaggtgctgctgttcggacaggcgattcagaccgccggtacagtaaaaggtcgtggttccagccagcacgcgaaatccgactggatggagatggaaaagcagcgtggtatctcgatcaccacctcggtaatgcagttcccgtatcatgactgcctggtgaacctgctggataccccggggcacgaagacttctccgaagatacctaccgtaccctgacggcggtggactgctgcctgatggtgattgacgcggcaaaaggcgtcgaagatcggacccgtaagctgatggaagtcacccgtctgcgcgatacgccgatcctcacctttatgaacaaacttgaccgtgatatccgcgatccgatggagctgctggatgaagtcgagaacgagctgaaaatcggctgcgcgccgattacctggcctatcggctgcggcaagctgttcaaaggcgtttatcatctctacaaagacgaaacctacctgtatcagaccggtaaaggccacaccatccaggaagtgcgtatcgtgaaggggctcaacaacccggatctcgacgcggcggtgggggaagacctggcgcagcagctgcgtgacgagctggagctggtgcagggggcgtcgaatgagttcgacaaagatctgttcctggccggggaaatcaccccggtcttcttcggaaccgcgttaggtaacttcggcgttgaccatatgctggatggcctggtggagtgggccccggcgccgatgccgcgcaacaccgacacgcgtgaagtcaccgccacggaagagaaattcaccggcttcgtgtttaaaattcaggccaacatggatccgaaacaccgcgaccgcgtggctttcatgcgggtggtgtccggcaaatatgaaaagggcatgaagctgcgtcaggtgcgtatcggcaaggacgtagtgatttccgacgcgctgacctttatggcgggcgatcgctcgcacgttgaagaagcgtacccaggcgatatcatcggcctgcataaccacggcaccattcagattggcgatacctttacccagggcgagatgatgaagttcaccggtattccgaacttcgcgccggaactgttccgtcgtattcgcttgaaggatccgctgaagcagaaacagctgctgaaagggctggttcagctctctgaagagggcgcggtccaggtcttccgcccgatcgctaataacgatctgatcgttggcgccgtcggcgtgctgcagtttgacgtggtggtagcgcgtctgaaaagcgaatacaacgtggaagcgatttacgaatcggtcaacgtggccaccgcgcgctgggttgaatctactgacgtgaagaagttcgaagagttcaagcggaaaaatgaagttcagctggcgctggatggcggcgataacctgacctacatcgccccgacaatggtcaacctgaacctgacgcaggagcgttaccctgacgtggtgttccgcaaaacgcgcgagcactaatccctgacgaagcgcggcgcaggccgcgcttttttctgattacgcccccgttcccttccttctggaaagttcttaaaacaccgctaattcgtctgttttttatccatatcctccgcaaccccttcgtctgtctactatatttaattcgtgtttttaaaaatgctggcgtaattcactgcgataagacgccagcgctggtgaaaaaacgaggacataacgatgaccagactaaagaatgccaatatgttgctggcgctcttcttaggcttagccgcgttgaacgcctcggcagagacggaaaaaacaacggtagacagtgcgaagtcggctgccagcaatgcgggagaggcggtagataattcgattaacaaagtcggcgattttatggacgacagtaccattaccgcacgggtaaaagcggcgctgatcgaccataaagatattaactccggcgatatttcggtgaaaacggagaataaagtggtcaccctcagcggcgacgtcaccagtgctgaacagaaaagtcaggcactgagcgtagcgaaagaggtcaaaggcgtctcacacgttaacgacaagctgacggtccatcataaatcatcgagcgagacggcgacgctgaaaggctatgccggggataccgccattaccagcgaagtgaaagccaagctgctggcggatgacattgtcccttcgcgcaatgtgaaagtcgaaaccaacgccggcgcggtacatctgaccggtacggtggcttccgcggcgcaggcggagcgtgccgcagagattgcgaaagcggtctccggtgtgaaaagcgtgcgcaacgatcttagcgttaagtaaaccgagttattaacaaaagtgttgtctggccaaggttgccgaacgaatagcagcatccactgagcgatgagctatacagaaagggtgcgcaaaccgctgttcaccgtccattatggtaaggagaaaagtatgtttcgatggggaattatttttctggtcattgcattaattgctgcggctctgggctttggtggtctggcgggtacggccgctggcgcagcgaaaatcgtctttgtcgtcgggattatcttgttcctggtgagcctgtttacaggacgcagacgtccttaggcggcccgcgatgcgggcgatactgaagcctaagcatttttactgacacgtcatcttacacaaagccagtcctgaggactggctttcgcggtttaagcggcgggcaaattgcgttaccttgtcaggagaagatcaatcgaacaggaaagcagggtggggcaacgcattcccgtcacgctgggcaatatcgccccgctggcggttaaacccttccgaccaggcaagctggcgctggtatgcgaaggcggaggacagcgagggatttttactgccggggtgctggacgaatttatgcgcgccggatttaacccctttgacctgatgctgggtacttccgccggcgcgcaaaacctctccgcctacatgtgtaatcagcaaggctatgcccgcaaagttatcacccgctacaccacttcacgccagtttttcgatccgatgcgctttgtgcgcggcggcaaccttatcgatctcgactggctggttgaggccacttcgcagcaaatgccgcttgccatgaactatgccgaagcgcagttcgcgttgggcaaagagctgtggctatgcgcttgccgcggtgacgattactccgccagctatttttcgccgacgccgcaaacgtggctggatctgatccgcgcctccagcgccatccccggcttttatcgcagcggcgtgttgctcgacggcgttagctacctggacggcggcgtcagcgatgcgatcccggtgcaggaggcggcccgccgcggcgcccagaccatcgtggtgatccgtaccgtcccttcgcagatgttttataccccgcagtggttcaagcggatggagcgctggctgggagagagtagtctgcaaccgctggtcaatttggtgcatcatcacgaaaccacctaccgcgccatccagcagttcatcgagaaaccgccgggtaagttgcggatcttcgaaatctatccgcagcggccgctgcgcagcatggcgcttggcagccgactaccggcgctgctggaggactacaaaaccgggcgccagtgcggccgttatttcctggcaacggtgggtaaactactggccgaccagccgccgctgctgcgccacgcgccgcgtattgcccggcccgcgccggtggtggtgccgccggtgccggtggccaatgaagcgccccaggcgaccatcattcctgcgccccaggcgaatgaccccagttttgatcatgaggatctggcgtgacgcaccgttttatcgatacccactgtcactttgattttccccccttcgcggcagatgaggtcgccagcctggcgcgtgcggcgcaggccggcgtcgggcgaattatcgttccagccatctctgctgagcgttttagccgcgtgctggcgctggcagctcagcacgaagcgctgtacgccgcgctgggtatgcatccgatcgtcatcgaagagcatactgatgagggactggcgcagctggaagccttgatggcgcagcggccgcctaaactggtggcggtgggagagattggcctcgatctttatcgcgacgatccgcagtttgatcgtcagcaggcgctgctggaagcgcagctgaggctggcgaagcgttacgatctgccggtgatcctccactccagacgcacccacgataagctggcgatgctgctgaaaaaacatgccctgccgcgtaccggagtcatccatggctttgccggcagcctgcagcaggccgagcgcttcgttcagcttggctataagatcggcgttggcggcaccattacctatccccgcgccagtaaaacccgtgaagtgatggcgcgtctgccgctttccgctctgctgctggagaccgatgcgccggatatgccgctaaatggctttcagggacagcccaatcgaccggaacaagctgcacgggtatttgaggcgctgtgtgaactgcgtccggagtcgccggcagccatagaagaagggatcatgcacaatacgctcgccttgttttcccttcccccggcctctgtatggtgatcgatttctcataattgtccatccatatcattgatttgcttaaaatgtgtgaagccagacgggcaggatagtttcaggccgatataatcacgcggttagtactggactatcaaaaacacagggaatctgtatgcaaatcctcatgggacttatcggcatggtggcgctattggccattgctgtgctgctctccaataaccgaaaagccattaacctgcgcaccgtgctcggcgcctggataatccaggtgggtatcggcgcattgatattatatgtaccggccgggcgctcggcgctgctagcgatgtcgaatggcgtcgccagcgtaatcgcctatggtaacgaagggatcagctttatcttcggtgggctggtctccgataaaatgttcgaggtgtttggcggcggcggcttcgtctttgccctgcgcgtgctgccggtgatcgtcttcttctcgtcgctgattgccgtgctttactacctgggcattatgcaactggtcattcgcattctcggcggcgcgctgcgggcagtgctgaagacctcacgtaccgaatcgctatcggctacagcgaacatcttcgttggtcagaccgaagcgccgctggtggtgcgtccttatatcgccaccatgacccgctcggagctgtttgcggtcatgtgcggcggcctggcctcggtggcgggctcggtactggcgggctacgcgcagatgggcgttccgctggagtaccttattgccgcgtcgtttatggcggcgccgggaggcctgctgtttgccaaaattatcgtaccggaaacggaaaaaccggacgataacccggctcatgacagccaaagcgctgacgcggataaaccggccaacgtgctggatgccgccgcctccggcgccgcgtctggtatgcaactggcgctcaacgtcggcgcgatgctgctggcgtttattgcgctgatcgccctgctgaacggcatactctccggcgtcggcggctggtttaaccatcctgagctgtcgctgcagatgatcctcggctggatcttctcaccgctggcgtgggtgattggcgtgccgtggcacgaagcgacggtggcggggtcgtttatcggccagaagctgatcattaacgagttcgtggcctacatgaactttggcgaatatttaaaggcagatgccgaagtggcggcggccgggctgcaggtcatttcagatcacaccaaagccattatctctttcgcgctgtgcggctttgccaacctgtcatcgatcgccattctgattggcggactcgggggaatggcgcccaaccggcggcaggatatcgctcagcttgggctacgtgcggtagcggcggggacgctgtccaacctgatgagcgccaccatcgctggggtttttctcgccctgtaagcctgtctcctgaaccagcggccaccgtgccgctggtgttgctgtaaatgtgataattccatcaccactctcttttttgaaaaaaggtttatatttcaatttgtagcgtttttattgcccgtaagttgggcaaaatgtgcgccacgctatcgagtgtacctgttattgtgtgttagaattatcacattctcatcggcggtatagtatcgattatgcttaagaggggactaacgataattgctgcggtattgagtgctaatttgtgattttaatcacgttacagtaatgcaaattagtaagtagttttcattaactgtgatgaatgtcgaagtgtaacgacgagcgaatgttacaatagtaacagactcgcaaggtgaacaaactattgatccggcatgacgccggcggagtatgaaatgactgatttaaaagcaagcagcctgcgcgcgttaaaactgatggacctgaccactctgaatgacgacgacaccaatgagaaagtcattgccctgtgtcatcaggcgaaaacgccggtgggtaacaccgcggcggtctgcatctacccgcgcttcatcccgatcgcccgtaaaacgctgaatgagcaggggacgccggatattcgcatcgccacggtcaccaacttcccgcacgggaatgacgatatcgacattgcgctggcggaaacccgcgcggcgatcgcttacggagcagatgaagtggacgtggtcttcccgtaccgcgcgctgatcgccggcaacgagcaggtcggtttcgagctggtgaaagcctgtaaggaagcctgtgcggcggctaacgtgctgctgaaagtgatcatcgaaaccggtgagctgaaagaagaagcgctgatccgtaaagcgtctgaaatctctatcaaagccggggccgatttcatcaaaacctcgaccggtaaagtgccggtgaatgccacgccggaaagcgcgcgcatcatgatggaagtgatccgcgatatgggcgttgagaaaaccgttggcttcaaaccggcgggcggcgtgcgcagcgcggaagacgcgcagcagttcctggcgatcgctgatgaactgttcggcgccgactgggccgattctcgtcactatcgttttggcgcatccagcctgctggctagcctgttgaaagccctgggtcacggcgacggcaagagcgccagcagctactaatcccttgatttgccggatggcgctgcgcttatccggcctacgaattgatgcctgtaggccggataaggcgctcgcgccgtcatccggcaatttattctctttgggaggttaccgtgtttctcgcacaagaaattattcgtaaaaaacgtgatggtcaggcattaagcgatgaagagatccgctttttcatcaacggcatccgcgacaatactatctctgaagggcagatcgccgcgctggcgatgaccatcttcttccacgatatgtctatgccggagcgcgtttcgctgaccatggcgatgcgggattccggtaccgttctggactggaaaagcctcaaccttaacggtccgatcgtcgataaacactctaccggcggcgtcggggatgtcacttcgctgatgctggggccgatggtggccgcctgcggtggttacgtaccgatgatctccggccgcggcctcggccataccggcggtacgctggacaaactggaagcgatcccgggcttcgatatcttcccggacgacaaccgcttccgcgagattattaaagatgttggcgtggcaattatcgggcagaccagctcccttgccccggccgacaaacgtttctatgccacccgcgatattaccgcgacggtggactccatcccgctgattaccgcctcgattctggcgaagaagctggcggaagggctggatgcgctggtgatggacgtcaaagtcggcagcggcgcgtttatgccgacttatgaactctctgccgcgctggccgaagcgatcgtgggtgtcgccaacggcgccggcgtgcgcaccaccgcgctgctgaccgatatgaatcaggtactggcctccagcgccggcaacgccgttgaagttcgcgaagcggtgcagttcctgaccggcgaataccgcaacccgcgcctgttcgacgtgacaatggcgctgtgtgtggaaatgctgatctccggcaagctggcggcggacgatgccgaggcgcgcgcgaagctgcaggcggtgctggataacggtaaagcggcggaagtgtttggccgcatggtcgcggcgcagaaagggccgagcgactttgtcgagaattatgctaattatctgccgacggcgatgctgagcaaagcagtctatgctgataccgaaggttttatcagcgcgatggatactcgcgcgctgggcatggcagtggtttctatgggcggcggccgccgtcaggcatcggacaccattgactatagcgttggctttaccgagatggcgcgtctgggtgaccgcgtcgacggacagcgtccgctggcggtgatccatgccaaagacgagaacagctggcaggaggccgcgaaagcggtcaaagcggccattaaactggacgataaagccccggaaattacaccgacagtctatcgccgtatcactgaatagcgatatactgatctgatcgcttttttgcagcgcaagatgtatggagaacaagatgaaacgtgcatttatcatggtgctggactcctttgggattggcgcaacggaagacgcagaccgctttggcgacgtcggcgccgatacgctgggccacattgcagaagcctgcgccaaaggcgaggctgaccacggccgcaaaggcccgctgaatttaccgaacctgacccgtctgggtctggtgaaagcgcatgaaggctccaccggtaaaattgccgcgggtatggatggcaatgccgaagtgattggcgcctatgcctgggcgcatgaactttcttccggtaaagataccccgtccggccactgggaaatcgccggcgtgccggtgctgtttgactggggctacttcagcgaccaggaaaacagtttcccgcaggagctgctggataagctggtgaaacgcgccaacctgccgggctatctcggcaactgccactcctccgggacggtgatcctcgatcagctcggcgaagagcatatgaaaaccgggaaaccgatcttctatacctccgctgactcggtgttccagatcgcctgtcacgaagagacctttggcctcgacaagctgtatgagctgtgcgaaatcgcgcgtgaagaactgaccgaaggcggctataacattggtcgcgtgattgctcgtcctttcgtgggcgacaaagccggtaacttccagcgtaccggtaaccgtcacgacctggcggtagagccgccggcgccgaccgtgctgcagaagctggtcgacgagaaaaacggccacgtggtgtccgtgggtaaaatcgccgatatctacgccaactgcggtatcactaagaaagtgaaagccaccgggctggacgcgctgttcgacgcgaccatcaaagagatgaaggaagcgggcgacgagactatcgtcttcactaacttcgtcgattttgactcctcctggggccaccgtcgtgacgtcgctggctacgcggcgggtctggagctgttcgaccgccgtctgccggagctgatggagctggttggtgaagacgacattctgatcctcaccgccgaccacggctgcgacccgacctggactggtactgaccacacccgcgagcatatcccggtgctggtgtacggcccgaaagtgaaaccaggttcgctcggtcaccgtgaaaccttcgcggacatcggccagactattgcgaaatactttggtacgtctgacatggaatatggcaaagccatgttctgaggtcattgcccggtggcgcacagcgatccgggcctacgatttgtaggccgggtaaggcgtagccgccacccggcaaaaacaacaatgtaaaaggaactgaagatggcaactcctcacattaacgcagaaatgggcgatttcgctgacgtcgttttgatgccgggcgacccgctgcgcgcgaagcacattgcagaaaccttcctcgaagacgtgcgtgaagtgaacaacgtgcgcggcatgctgggcttcaccggtacctataaaggccgcaaaatctccgtgatgggccacgggatgggtatcccgtcctgctctatctacaccaaagagctgatcaccgatttcggcgtgaagaaaatcatccgcgtgggctcctgcggcgcggtgcgtgaagatgtcaaactgcgtgacgtggtgatcggcatgggcgcgtgcaccgactctaaagtgaaccgtctgcgtttcaaagaccatgattttgcggcgattgccgatttcggcatggtgcgtaatgcggtagacgcggcgaaagcgctgggcgttgacgcgcgcgtcggcaacatcttctccgcagacctgttctatacgccggacccgtccatgttcgacgtgatggaaaaatacggcattctgggcgtggaaatggaagcggcgggtatctacggcgtggcggcggagttcggcgcgaaagcgctgaccatctgcaccgtctccgaccacatccgtacccacgagcagaccactgccgctgaacgtcagacgaccttcaacgacatgatcaaaatcgcgctggaatccgtgctgctgggcgataaagagtaagagctgttgtgccgggtggcggcttcgtctgacccggcctacggttttccaggcccgctaagcgcagcgggctttttttatcagcgcactgcgccggcaatccacgccgacagttctttcagttccgcttcctgctccgggaaatcgccgaccagcgcctcgcactgctgctgtaatacttctgcccgatactgacagccgactaagcgtgccgccagggcctccagcggcgccgggttcaggctatcggtaaaggcctgcgcgcgggtgatatgccctttttcgacgtcaaaatgcagctcaacgccgccccagcgaaagcgctcgtccagaagatgagagaaggccggcgcctggccgaagttccactcccagctgctctgacgggcgaaggtctcagcaaaatttggtagatccggcgtgttgtccggggagatcacctcggcgtccacccgttcgccgtaatggctgaagaatgcttcctggatcgcctcgcaaacttgctgatgggtaatgcccggcagcagctcaaccaggttcgccacccgtccgcgcaccgaggtaatgcctttagcctgcagctttttctggtccgggttgaggtagttggcgagacggcttaaatcggcgttgagtagcagggtaccgtgatgaaaaccgcggtccatggtttcacgataggcggagccggagactttgcggtcgccgctgtcggttttgaccaccagatcgttgcgcccggaggcttcggcggttacgccgagtgaattaagcgccgccagcacaatagcggtggagacggttttgtcgtactccggtttgcctgccataaaggtaaagcaggtattgccgaggtcgtggaacaccgcgccgccgccgctgctgcgacgggccagccgcacatggtcttcctccatgcggcgggtattacactccttccacgggttctgcgcgcggccgatgaccacggtatcggcattgcgccacaggaacagcacccgctgggtggcgggcatctggcggaaaatgcactcctcgaccgccaggttgaaccacgggtcgtaagagtcagagagcaggaggcgcaatgtggacattatagatttcctttcttttcatcgtcttcatcctcaaccggcttgttggcggtgagcaggaagggcgattgctgccagcgggtgcgtttgccctgcagcagcgtgcgggtcagcaccacgccgatagccagggacagtaacagcatcaggcgtaagatattggtggtattatccacctgcttcgcctcggtcgccagggtatgagtatcgagggtcagacgcaggtagcccagcgggccgttttttcctggcaccggttcgacaatctgctggttgaagtagccgccggcttttttaccatccagcgccagccggtcgcgaacctcgacgctttcgccagagcgcgccaccaggtcgccctgttcgtcatatacgccggcgtccaggacgcggctgttatgggttagctgggtcaacagctgattgatgcgcttctcgtcaggcgtctcgctgcgcatcagcggcgcgagattcagcaccacctgctgcgccagcgtgcgggccagctcttccagctgcggattgcgttgtttctgactgttctgactgaaccacgaagcgccctgcatcagcgcgacgagtagggcgagacagataagaacaatgaccgcacgatgcagccggaatttcagttttgcgcgaaccatattccacctttgaaaatttgcagcttaatgttgccagaagcgctggttacaaggtagcctcatgcgttattttcctcgcctgaatgaagagatgtggagccgtaatgcctaacagtttgacctggtgcgacctgcctgaagacgtttccctgtggcctgggttgccgctttccctgagcggcgacgaggtcatgccgctggattatcacgccgggcgcagcggctggctgctgtatggtcgcggtctggataaacgtcggctgacggcgtggcagcgtgagctgggcgccgcgttagtgatcgttgcctcctgggtggtcgaggattaccaggtgatccgtctggccggttcgctgactccccgtacgacgcgactggcgcatgaggcggggctggacgtcgcgccattgggtaaaattccccatttgcgcaccccgggcctgctggtgatggacatggactccacggcgattcagatcgaatgcatcgatgagattgcgaaactggccggcaccggcgagctggtctcggaagtgaccgagcgggcgatgcgtggcgagctggacttcaccgccagcctgcgccagcgcgtggcgacgctgaaagacgccgatgccagtattttgctgcaggttcgcgacgcgctgccgctgatgccgggcctggcgcagctggtgctcaagctggaaacgctgggttggaaagtggcgatcgcctccggcggtttcaccttctttgccgagtatctgcgcgacaaactgcatctcgacgcggtattcgccaatgagctggagatccgcgacggcaagctcaccggcaacgtgctcggcgatatcgtcgatgcgaaatataaagccaatacgttgcgcaagctggcggaaaagtatgagatcccaacggcgcaaaccgtggctatcggcgatggcgccaacgacctgccgatgattaaggcagcagggcttggcatcgcctatcacgcgaagcccaaagtgaatgaacaggcggaagtgactatccgccacgctgacctgatgggggtattctgtattctctcgggcagcatgaaccaaaagtaagaggtaaacgtggcgaaagctccaaaacgcgcatttgtctgtaatgaatgtggtgcggattatccgcgctggcaggggcagtgcagcgcctgccatgcctggaacaccatcaccgagatgcgcatcgccgcgtcgccgcaggtggcgagaaacgagcgtctttcaggctatgccggtaacgccggcgtgtcgaaggtgcagaagctgtcagatatcagcctggaggcgctgccgcgtttctccaccggctttaaagaattcgaccgcgtgctgggcggcggcgtagtgccgggcagcgcgatcctgattggcggcaaccccggcgcgggcaaatcgacgctgctgctgcaaaccctctgcaaactggcggaagggatgaaaaccctgtacgtcaccggggaggagtccctgcagcaggtggcgatgcgcgcccatcgtctcgggttgccaacggccaacctgaacatgctctcggaaaccagcattgagcagatctgtcagatcgccgatgaagaaaagccgcagctgatggtgatcgactccatccaggtgatgcatatggccgacgtgcagtcgtcgccgggcagcgtcgcccaggtacgggaaaccgcggcctatttgacgcgctttgctaaaactcgcggcgtggcgattgtgatggtcggccacgtcaccaaagacggctcgctggccggtccgaaggtgctggagcactgtatcgactgctcggtgctgctggacggggatgccgactcccgcttccgcacgttgcgcagccataaaaaccgctttggcgcggtgaacgagctgggcgtcttcgccatgaccgagcagggcctgcgcgaagtgagcaacccgtccgctatcttcctcagccggggagatgaaatcacctccggtagctcggtgatggtggtctgggaagggacccgcccgctgctggtggagatccaggcgctggtcgatcactcgatgatgtccaacccgcgccgcgttgcggtggggctggaacagaaccgtctggcgatcctgctggcggtgctgcaccgtcacggcggcctacagatggccgatcaggacgtcttcgtcaatgtggtcggcggggtgaaggtcacggaaaccagcgccgacctggcgctgctgctggcgatggtctccagcctgcgcgaccgtcctctgccgcaggatctggtggtctttggcgaagtggggctggccggggaaattcgcccggtaccgagcggtcaggagcgtatctccgaagcggcgaagcacggctttcgccgcgccatcgtcccggcggccaatgtgccgaaaaaagtgccggaaggcatgcaaatctttggcgtgaaaaagctttcagacgcgctaagcgtttttgacgacttataataagttaaaaggagattagcgatgtcgtcatttgactatttaaaaagcgccattaagcagaaaggctgtaccctgcagcaggtggcggaagccagcggaatgaccaaggggtatcttagccagctgctgaatgccaaaatcaaaagcccgagcgcgcagaagcttgaagcgctgcatcgtttcctcgggctggagtttccccgccgacagaaaagcgtcggcgtggtgtttggtaagttttacccgctgcataccgggcatatctacctgatacagcgcgcctgtagccaggtcgatgagctgcatatcattatgggctatgacgatacccgcgaccgcgagctgtttgaagagagcgccatgtcgcaacagccgacggtgcctgaccgcctgcgctggctgctgcaaacctttaaatatcagaagaatattcgcatccacgccttcaatgaagaggggatggagccctatccgcacggctgggacgtctggagccatgggatccgcgcttttatgagcgaaaaagggatcgagccgaaccggatctatacctcggaagaggccgatgcgccgcagtaccttgagcatctggggatcgagacggtgcttatcgatcctaagcggacctttatgaatattagcggcgggcagatccgcgagaacccgttccgctactgggaatatattccgacggaagtgaaaccgttctttgtgcggacggtggcgatcctcggcggcgagtcgagcggtaaatcgacgctggtcaataaactcgccaatatcttcaataccaccagcgcctgggaatatggccgggattatgttttttcgcatctcggcggcgatgagatggcgctccagtattcggattacgataaaattgcccttgggcatgcgcagtatattgattttgcggtgaaatatgccaacaaggtggcgttcatcgataccgacttcgtcagcactcaggccttctgtctgaagtacgagggacgtgagcacccgtttgtgcaggcgctgattgatgaataccgcttcgacctggtgatcctgctggagaacaataccccgtgggtggccgatggactgcgcagtcttggaagctcggtggatcgtaaagagtttcagtcgttgctggtatcgctgctgaaagagaacgagatcgaattcgtccatgtgaaggagtcggactacgatgcccggttcctgcgctgcgtcgagctggtgaaacagctgatgggcgagcaggggtaggtgctctgcgggctgtagccctcaccccaaccctctcccaatgggagagggagcaaacattaaaaaaggcaacttgcgttgcctttttgcgttttatttcgcgatacgtttgtacttgattcgcttcggctccagcgcgtcggcgccgagagtgcgtttcttgtactcttcgtactcggtaaagttaccttcgaagaactcaaccttaccttcatcctggtaatccagaatgtgggtggcaatacggtcaaggaaccagcggtcgtgcgagataaccatcgcgcagcccgggaactccagcagggcgttttccagcgcgcgcagggtttcgatatccaggtcgttggttggttcatcgagcagcaggacgttaccgccgacctgcagcagtttcgccaggtgcagacgaccacgttcaccgccggacagctcgccaacgcgtttaccctggtcgacgcctttgaagttaaagcggcccacgtaggcgcggctcggcatctcggtgttgccgatcttcatgatatccaggccgccagacacttcttcccacacggtcttactgttgtccatcgcgtcgcggaactgatcgacggaagccagcttaacggtttcacccagggtgatggtgccggaatcaggctgttcctggccggacatcatgcggaagagggtggatttacccgcgccgttcggaccgatgatgccgacgatagcgcctttcggtaccgagaagctcagatcgtcaatcagaacgcggtcgccgtaagatttgcgcagatggctgacttccagaactttatcgcccagacgcgggcctggcggaatgaacagttcgttagtctcgttacgtttctgatattcaacgttgttaagctcttcaaagcgcgccaggcgggctttgcccttagactgacggcctttcgcgccctggcgaacccactcgagttctttctcgatagatttgcggcgtgcggcttcctgagaagcttcctgcgccagacgctggtctttctgctccagccaggaggagtagttgccttcccacggaataccttcgccgcggtcaagctcgaggatccagccggcgacgttatcaaggaagtaacggtcgtgggtaatcgccaccacggtgccttcgaagtcgtgcaggaagcgttccagccaggcgacggactcggcgtcgaggtggttggtcggttcgtcgagcagcagcatatccggtttttccagcagcagacggcacagcgcgacgcggcggcgttcaccaccggaaagattagcgattttcgcatcccagtccggcaggcgcagggcgtcggccgcgcgctccagctggacgttcaggttgtggccgtcgtgcgcctggataatctcttcgaacttgccttgctgtgcggcaagcttatcgaagtccgcatccggctcggcgtatttggcatagacttcgtccagccccttcagcgcgttaaccacttcggcgaccgcttcttccacggactcgcgcacggtgtgctccgggttgagctgcggctcctgcggcaggtagccgattttgatgccgggctgcggacgcgcttcaccttcgatctcggtgtcgataccggccatgatgcgcagcagggtagatttaccggcgccgttcagaccgagcacaccgattttcgcgccagggaaaaagctgagggagatatttttcaaaatatgacgtttcggcggaaccactttgccgacacgatgcatggtataaacgaattgagccacgttggacttcgcctctttctattttgatagatagttcaaagccgaagtgtagcctttttcgcgcgctaatcccagcgaggcgacaggattcacagaagcgtaaaaaaatgtccaggacatggcgcgtttagcgttgtctgattagcataagtaaagccgcctgccgaaccggcaggggtttttaagcggcacgatgctgcgaaaatgcaccggaaagaggaagagcttgtggaaaaagccaaaaaaatgacgtggcatcttttggctgccagcgttggtttgttgacgttgagtcagctggcgcatgcggattcactggatgaacagcgcagccgctacgcacaaattaagcaggcgtgggataaccggcagatggatgtagtcgaccagctgatgcccacgttaagcacctatcccctgtatccctatttgcagtaccgacagatcaccgacgatctgatgaaccagccggcgctggtggtgaaaaactttattgacgccaatccgacgctgccccctgcgcgttcattacgttcgcgcttcgtgaatgaactggcccggcgcagcgactggcgcggcttgctggcgtttagcccggataagccgaccagcaccgaggcgcagtgcaactattactacgccaagctgagcgtgggacagtcgcaggaggcctggagcggggcgaaagagctgtggctgacgggcaagaatcagcccggcgcctgtgaaccgctgttcagcgcctggcgcgactccggtcagcaggatccgctggcatatctcgaacggatccgcctggcgatgaaggccggcaatatcgggctggtgaaatcgctggcccagcaaatgcccgccaactaccagagcatcgccagcgccgtggtcgccctggctaacgatccaaacagcgtcctcaccttcgcccgcaccaccggggcgacggactttacccgtcagatggccgccgtcgccttcgccagcgtcgcccgccaggacgtggaaaatgcccgcctgatgatcccttcgctggtacaggctcagcagctcaatgaggatcagacccaggaactgcgcgatattgtcgcctggcgcctgatgggtagcgatgtaaccgaagagcaggccatctggcgcgatgacgcaatcatgcgttcgcagtccacgccgctggtggagcggcgggtacggatggcgttggggacgggcgatcgccatggcctcaacacctggctggcgcgcctgccgatggaggcgaaagagaaagacgaatggcgctactggcaggcggatctgctgctggagcgcggcagggatgaggaggcgcaggcgatccttcgctcgttgatgcaacagcgaggcttctacccgatggtcgccgcgcagcgtcttggcgaggagtataccttccgcatcgataaagcctcgggcaccatcgatccggcgctggcctccgggccggagatggcgcgggtacgtgagctgatgtactggaatatggataacaccgcgcgcaccgaatgggccaacctggtcactagtcgcaccaaatcccagcaggcgcagctggcgcgctatgccttcgatcagcactggtgggatctgagcgtgcaggcgacgatcgccggtaagctgtgggatcagctggaagaacgtttcccgctggcctataacgacctgtttgcccgctatgttagcggcaaagatattccgcagagctacgcgatggcgattgcccgtcaggagagcgcctggaacccgaaagtgcgctcgccggtcggcgccagcggactgatgcagattatgccgggcaccgcgacgcataccgtcagtatgttcagcattcccggctacagcggcccgtcgcagctgttggatccggaaaccaacatcaacatcggcaccagctatctgcagtacgtttatcagcagttcggcaataaccgtatctacgcctcagcggcctataacgccgggccgggccgggtacgcagctggcaggggaacagcgccggacggatcgacgccgtggcgtttgtcgagagtattccgttttcggaaacccgcggctacgtgaagaatgtcctctcctatgacgcctactaccgctactttatggggcagcaggataagatcctcagcgatgcggagtggcgccagcgttactgatcgccgggaagtatgttatgctttgtactcgttgaagagtacattcgacgggcagcgtaagctgcccgtctcaatatggtggcgcgatatgacccaacaatctccctattccgcggccgttgccgaacaacgtcatcaggagtggctgcgctttgttgccctgcttcagcaggcctatgctgaggatctgcatctgccgttgctgcagctgatgctgacgcccgacgagcgcgaagccctgggtacccgggtgcgcattatcgaagagttgctgcgcggcgagatgagccagcgtgagctgaaaaatgagctcggcgccggaattgcgaccattacccgcgggtcgaacagcctgaaatcggcgccggtagagctgcgccagtggctggagcagacgctgctggctagcgataaatagcgttatggaacgggcttagcgccagcacgaccgcctggtggtaaacgctgctgcgggttaatctgccgccggtgaaaaccccaatcgccccctctttacgaccgatctgatcgatgccggtatactgcgacatgaccgggccgagggcttcgccagcgcgaacctgctcaagaataacgtcaggcaacggcagcgtggctgagcgcgcttctccgcgctggctggcgctttcgatgaccacccagctaaaggtgctgtcatcgtcgataccggcttcgatggctacccagaaatcggcatttggctgggcaaggcgcgcattggcgacgcgatttcgtgcgccagcgcgcgtttcctcgctgccgaagggctgttccggcacgccgctctcgacggcgacggactcaatgtggcaggatccttcgccgaaaatctcgtcaaaagcctgcagaattgcctgaattttggcgggattagtggtcgctgagacaacatggtgcataatcaaaacaactcagaataaactaacgtcatcgcagtatactctaaatcaccccgagggcaggcggtaatgcccgaaagcggttgataacgagtccagaacggaaaaaaagcatgttacaagtataccttgttcgccacggtgaaacgcagtggaacgccgagcgacgtattcagggtcagtccgacagcccgctgaccgcccatggtgagcgccaggcctggcaggtgggcgagcgcgccagaacgctggggatcacccatatcattaccagcgatctggggcgaacccgccgcacagcagaaattatcgccgaagcctgcggctgcagcgtgatcgccgatgcgcgcctgcgcgaactggatatgggggtgctggagaagcgccatatcgactcgctcagcgaagaagaagaaggctggcgtcgccagctggtcaacggcacaccggacggtcgtattccgcagggcgaatcgatgcaggagctcagcgagcgtatgcatgcggcgctggcatcctgtctggaattacccgccggtagccggccgctgctggtgagtcatgggatcgcgctgggctgcctggtgagcacgatattagggctgccggcgtacgctgagcgtcgtctgcggctgcgcaactgctctatttcgcgcgtcgactatcagcaaagcccgtggctggcttccggctgggtggtggaaacggcgggcgacgtctcgcatcttgacgcccccgcaatggacgagctgcagcgttaacggcggatcgggatcagatactcgcagcgcaactgaatcggcgtggcctgatcccggctttcatcttcagggtagaagcgttcaatatccagccccttgcgacgcgtcaggttcagcatcggcatgcaggtgccgtagacggtcaggatgaattcctgcagaccggtacccagcccttcatacgtaaacatgacatactcgccgccctccagggtcactggatgggcatgctgcaggtggccgttagccatctccggcgtcagcgcggtggtatagaatacttcctgctcatcgtctttttccaggctcggacgcggctcatgcagcccgtagagcaccggggggattgacggtgagttgccgaggaagtctcgccagaactggacccgcatctggttacgaaaatcggagatttcctcgagcttacaggtatagctctgggtcacgtcaagcagctgagtagggggcagagtgataaactcatgtttcggcagggtaaattcgccaagacgcagcggcgggcgcataccgaacgagctccagtccggcgagcggcggtagagcgccggcgtcagcgagaattgtttcttaaacgctcgggtgaaggtctgctgggagtcgaaacggtactgcagcgcaatatcaaggattggacgggcggtcaggcgtaatgcgacagcagatttcgacaagcggcgcgcgcgaatataggcaccgatggcatggccggtgacatccttaaacattcgctgcaaatgccacttggaataacctgccttcgccgccacattatccagagaaagcggctgatccaggtgaccttccagccagctaaggagatcgcgaataatccctgcttgatccataaaatgtccccatccttaaacacaggtgcctgatattaaagtagcggataatagcattttttgatgttttagcattcagtgttttttttgcttttaaatgcggtaggtcaggggatttgaacgataattttgtaaagctgtgatctataaaccttttctgctaagtgcgtgataatcactcagctatattttttaataatggtaacaatatgaaatacaagaagtttgcgatggggctgctcctgctggccggtagccagctggctcaggcggagcagattggttccgtggatacggtcttcaaatggttagggccggatcacaaaatcgtcgtcgaagcctttgacgatccggatgtacagaacgtgacctgctatatcagccgggcgaaaaccggtggcatcaaaggcgggctggggctggcggaagatacctctgacgcggcgatttcctgccagcaggtcgggccgattgagctaacggacaaaatcaaaaacggtaaaagccagggcgacgtggtgttccagaagcgcacctcgctggtgtttaaaaaactgcaggtcgtgcgtttctatgatgcgaagcgcaatgcgctggtctatctgacctactcggataaagtggttgatggctcgccgaagaacgccatcagcgccgtgccgatcatgccatggaataaataaacgggagtgcgcatgcagcagccacggatttggttagttgaggatgaacagagtatcgctgataccctggtttacatgctgcagcaggagggcttccaggtcagcgtctttggccgcggtttgcccgcgctggaggcggcggcgcatcaggcgccagatgtcgccatcctcgacgtcggcttgccggatatcagcggcttcgagctctgtcggcgtctgctgacgcgttatccggcgctgccggtgctgtttttgacggcgcgtagcgacgaggtcgataagctgctggggctggaaatcggcgctgacgattatatcgccaagccgttttcaccacgcgaagtctgcgcgcgggtgcgaaccgtgctgcggcggctgcagaagtttgccgcgccatcgccggtggtacgcgtcggcgagtttgtgctcgatgagcaggcggcggcgatcagctggttcggccagccgctgaatctgacgcgctacgaatttctgctgttgaaaaccctgcttcacgcgcccggtcgcgtcttctcccgtcagcagctgatggagctggtgtggatcgatgcctgggaaagcctcgaccgtaccgtcgatacccatatcaaaaccctgcgcgctaagctgcgggctgtgaatcctgaaaaggcgccaatcaatacccatcgcggtatgggctacagcctggggcgcggctgatgcgcatcggcatgcgcctgctgctgggctattttcttatcgtcgcgatcgccgcgtggtttgtgctgtcgatctttgtccaggaagtgaagccgggcgtgcgccgggcgacagaggggaccctcaatgataccgctaccctgttggcggcgctggcgcgtgaggatctgctggcggcaaacccgcagcagggcaggctggcgcaggcctttcaccagctcaaccagcagccgctcaacgccaatattggcggaattaaaaaggtacgtaatgagtaccgcgtctatctgaccgatgcccggggcaaggtggtgtttgactccagcgggcaggcgacagggcaggactattcgcgctggaacgatgtctggctcaccctgcgcggccagtacggcgcgcgcagtacgcgcagcgatccgcatgatgaagccagctcggtgatgtatatcgccgcgccggtgatggataaggggcggattatcggcgtgctgagcgtcggtaaacccaacctggcgatgacgccggtcattaagcgcagcgagcggcggatcctctgggccggcggcgccctgctgggcattgcgctgttgattggcggcggcgtcgtctggtggatcaatttctctatcggcaagctggtgcgctatgcggactcggtgaccgctgagcgcccgctgccgctgccggaggttggcagcagcgaattgcgcaagctggcccaggctctggagagcatgcgggtaaagctcgaaggtaagaatgccatcgaaaactatgtctatgacctgacccatgaactgaaaagcccgctggcggccatccgcggcgcggcggagatcctgcgcgaagggccgccgcctgaggtagcggcgcggtttactgataatatcctcgcgcaaaacacccggatgcaactgctggtggagcggctgctccagcaggcgagactggaaagccggctggagataaagcagcatccggtgtcgatagatgcgctataccaacggctgacggaggagcgcaacatcgctctggcggcgaaagctatcaccctgcgctggcgggagagtgggatgctggtcaatggcgatggcgagctgctggcccaggcgctgggtaatctgctcgacaacgcgattgactttaccccccagggcggtgagatcgccctggctgcggagaagcgaaatgaagaggtgcaattgagcgttatcgacaacgggtgcggtattccggactatgccctggaacgaatctttgagcgattctattcgctgccgcgcgaagacggccataagagcagcggccttgggctggcgttcgttcgtgaagtcgcgcgcctgcatcacggcgatatcaatctgcacaatcggcccgaaggcggcgtggtcgccacgctgcgacttcaccgtcccttcacatagcttcaaattctccccacacagccgtcctattgtgaggccatcacgatagggagaaaggctatgttgaaatcaccgttattctggaaaatcaccacgttaataggctgtattgtgctgctatctttgccgttaatgatggtcagggagcttattaatgagcgagcggattatcgtaacgaagtggtggacgccattgagcaaagcaccagcggctcgcaaaaactcgccggaccgctgatcgctattccgataaccgagaccctgacccgcatggagaaccaaaaagaggtcaactatcagcggagctgggtgtattactggctgccggagtcgctggcggtcgccggcaagcagaccgtggagtcgaggagggtgggtatctacagcggccaggtctggcataacgtcttgcagattaaggcctcgtttgatccgctgcgtctggcggcgctgagaaaaacgaatatcgtcttaggccagccgcggctggtggtgagcgtcggcgatgcccgcggcattggcgccatccatgccccggaggtcaacggtaacgtattaagcgtggagccggggctggggataagcggcgatggcgcaggtattcatatgccaatgcctgcgctggcggaggacaacaagccgcttgagattgccttttcactcgatctgaacgggacgggtgagttttcactggtgccgctcgggcgtaacagcgagctgcagctgaccagtaactggccgcatcccggttttctcggcagcttcctgccaacgcaacgggaagtgagtgctgccggctatcgcgcccactggcaaagcagctggttcgccaacgatatggggagctatttcaaggatgatatggagatcccgtggtcgcgactgccggcgttcagtgccgatgtgatgtcccttgccgaccagtaccagctaaccgatcgggcgacaaaatatgccatcctgttaatcgggctgacctttatggcttttttcgtgttcgagagcctgacccgtcgccccctgcatccgatgcaatatctgctggtgggcttatcgctggtgctgttttacctggtgctgctggcgctctcagagcacattggttttaccgccgcctggctggcggccagcctgtctggcgcggtgatgaatgggatctaccttcaggcggtgctcagaggatggcgtaacagcctgctgtttgtcgccgcgctactgctgctggatggcgtgatgtggtttctgttgcattctgaggatagcgcgctgctgctgggtaccggggtgctggcgctggcgctgagcgttctgatgtttttgacccgtcgcgtggactggtatgcgttatcgctgccgaaaggcacagtgcctccgacaccggctgccgatgacgataagctgcgtctctggaaagagtgacggcataaaaaacggcgcccctggggcgccgttttcgcatcatggctgcggaataaatcgtattattcctgcagatcgccacagaaacggtagccttcaccgtgaatggtagcgatgatttccggggtatccggagtggattcgaagtgtttacgaatccgacgaatggtcacgtcaacggtacggtcatgcggcttcagctcgcgaccggtcattttcttcagcagttcggcacgagactgaattttgcccgggttttcgcagaagtgcagcatcgcgcggaattcactgcgcggcagcttgtactgttcgccgttcgggctaaccagggaacggctgttgatatcgagttcccagccgttgaacttgtagctttccacgctgcgacgctcttcgctcacggtaccgaggttcatggtacgggagagcaggttgcgcgcgcggatagtcagttcacgcgggttaaacggtttagtgatatagtcgtcagcgccgatttcgaggccaaggatcttatccacttcgttgtcgcggccggttaagaacatcagcgcgacgtctgcctgctcgcgcagctcgcgcgccagcagaagaccatttttacccggcaggttgatatccatgatcaccaggttgatatcattttcagacaggatctgatgcatttccgcgccatcggtcgcttcgaatacatcgtaaccttctgcttcgaaaatactttttaacgtgttgcgtgttaccaactcgtcttcaacgataagaatgtgcggggtctgcatgtttgctacctaaattgccaactaaatcgaaacaggaagtaccaaagtccctgacctgcctgctgcatgtcgcaaattaacatgcgcggcgtaacatgactaaagtacgtaattgcgttcttgatgcactttccatcaacgtcaacaacatcattagcttggtcgtgggtactttccctctggacccgacggtgtcaaaaacggctgacatcctaaccattttaacagcaacataacaggctaagagaggccgaacacccaataaaactacgcttcgttgacatatatcaagttcaattgtagcacgttaacagtcttgtgaaatcattgcatcgccatgctctttatagtcacaatctttaccaggctcaactagttgcgtggataaattaataaatacagtgaatccaaagcctgaaacgatgcatcagatgaaattgcattgcccatcatatggataaatgggttctgttaacatactccttgtcacggcctcctgagaacagtttagatttttttatgggtaagaaaacgcaattttagtgatttttgttgcaaatttgtaaattttcaccgcgtaaaatggggggcgctgcgcctcgataacgcctgagagagagaaagaaaccgcaatgcgtttaacgattattttagtcggtcctgcccgggccgagaacgtcggcgctgccgccagggcgatgaaaaccatgggatttcgcgaactacggatcgtcgatagcgaagcccacctggcgccgccggcacgctgggtggcgcatggctcaggcgacatcctcgatggtatcaccacctatcccacccttgccgaggcgctgcatgacgttgattttaccgtcgccaccaccgcccgcagccgcgcgcgttttcactattacgccacgccgcagcagctgttgccgctgctggaggagaaggcgcagtggatgaaccatactgccctggtatttggtcgtgaggacgccggattgaccaatgaggagctggcgctggctgatgtgttgaccggtgtgccgatggctgcggattatccgtcgctgaatctcggccagtcggtgatggtctactgttatcaattagcatcgctaatgcaacaaacggcgcccgccgccgctgcggcagaccatcatcagctgcaggccttacgtactcgtaccctggcgttactttcgcgtttgggcgttgaggatgatgccaaactggccgactggttgtcgcaacggctgggcctgctgcagcagcgcgacacggcaatgttgcatcgtttgctgcatgatattgaaaaaaacctgccagaataaaactctgccatattttttatttatggatgtgtacgctgttctatgagctggttttccgctgatctggatgttttttctcacggcagcgggaaaatacgtaagcctgctgaaatggggcaaattgagaaattcattgacttaagacggcagatactttaaccaatataggcaggacatacagacagataaaaatacagagtacacaacatccatgaatcgcatcggcatgattaccaccattatcaccaccaccattaccacaggtaacggtgcgggctgacgcgtacaggaaacacagaaaaaagcccgcacctgaacagtgcgggctttttttttgacaagagatcaaggggtaagaaccatgcgagtgttgaagttcggcggtacatcagtggcaaatgcggaacggtttctgcgggttgccgatattctggagagtaatgccaggcaggggcaggtagcgacggtcctgtctgccccggcgaagatcactaaccacctggtagcgatgattgaaaagaccattggcggccaggatgccctccccaatattgccgacgccgaacgcatttttgccgaacttcttcagggccttgccgacgcccagcccgctttcccgcttgcccagttaaaagccttcgtggagcaggaatttgctcagattaagcatgttctgcacggcatcagcctgctgggtcagtgcccggacagcgtcaatgccgcgctgatctgccgcggcgaaaagctctccatcgccatcatggcgggtctgctggaagcccgtggacataaagtcagtgtcattaacccggtcgaaaaactgctcgccgtgggtcactatctggaatccaccgtcgatatcgccgaatccacccgccgcattgccgccagccagatcccggcagaccatatgatcctgatggccgggtttaccgccggcaatgagaaaggcgagctggtggtgctgggacgtaacggctccgactactcggctgcggtactggccgcctgcctgcgcgctgactgctgcgaaatctggaccgatgtcgacggagtgtacacctgcgatccgcgtcaggtgccggatgcgcgcctgctgaaatcgatgtcttatcaggaggcgatggagctctcctactttggcgcgaaagtgctgcacccgcgcaccatcgcccctatcgcccagttccaaatcccatgcctgattaaaaataccggcaacccacaggcgccgggaacgcttatcggcgccagccgcgacgaggacgatttgccggtgaaaggcatctctaacctcaacaacatggcgatgttcaacgtctccgggccggggatgaaagggatggtcggcatggcggcccgcgtcttcgccaccatgtcccgcgccggcatctcggtggtgttgatcactcaatcttcttcggagtacagcatcagtttctgcgtgccgcagagcgactgcgcacgtgccaaacgggcgatggaagatgagttttatctggagctgaaagaggggctgctggagccgctggcgattatggagcgtctggcgatcatctccgtggtgggcgacggaatgcgtaccctgcgcggtatctcggcgaaattctttgcggcactggcccgcgccaatatcaatatcgtggcgattgcccagggctcttccgagcgctcaatttcggtagtggtcagcaatgacgacgccaccaccggcgtgcgcgtgacccatcagatgctgttcaacaccgaccaggtgattgaagtgtttgtcatcggcgtcggcggcgtcggcggcgcgctgctagagcagatcaagcgccagcaggggtggctgaagaacaaacatatcgatctgcgcgtctgcggtgtagccaattctcaggcgctgctgaccagcgtgcatggcctgaatctggaaaactggagtgcggaactggcggaggcgaaagagccgtttaatcttggccgcctgatccgcctggtgaaagagtaccacctgctcaatccggtgatcgtcgactgtacctccagccaggcggtcgccgatcagtatgccgacttcctgcgcgaaggtttccatgtggtgacgccgaacaaaaaggccaatacctcttcgctggattactatcaccagctgcgccatgcggccagcagctcgcggcgtaagttcctctatgacactaacgttggcgcgggcctgccggtgattgagaacctgcagaacctgctcaacgccggcgatgagctgcgccatttctccgggatcctgtccggctccctgtcgtttatcttcggcaagctggacgagggggtgagtttctccgcggcgacggcgatggcccgtgagatggggtataccgagccggatccgcgcgacgatttatccggggtggatgtggcgcgtaaactgctgattctggcccgcgagaccgggcgtgaactggagctggcggacattatcgtcgagtcggcgctgccgccggacttcgacgccagcggcgatgtcgagacctttatggcccgcctgccgtcgctggatgatggttttgcctcgcgggttgctaaggcgcgcgatgaaggtaaagtcttgcgctacgtcggtaacatcgaagaggatggtacctgccgggtaaaaatagccgcggttgacggcaacgatccgctgttcaaagttaagaatggtgagaacgcgctggctttttatagccattattatcagccattgccgctggtgctgcgcggctatggcgccgggaacgacgtcacggcggccggcgtattcgccgacctgctgcgcaccctgtcctggaagttaggagtttaagatggtcaaagtatatgccccggcttccagtgccaatatgagcgtcgggtttgatgtgttgggcgcggcggtcacgccggtcgatggcacgctgcttggcgacaacgtcactgtcgaagcggcggagcaatttagcctgcagaatcttggacgcttcgccagcaaactgccgacggcgccgcaggagaacattgtttaccagtgctgggaaagcttttgccgggagatcggcaagacggtgccggtggcgatgacgctggaaaaaaacatgccgattggctccgggctgggttccagcgcctgctcggtggtcgctgcgctggtggccatgaacgagttctgcggcaagccgctgaacgagacgcgcatgctggcgctgatgggagagatggaagggcgtatctccggcagcattcactacgacaacgtggcgccgtgctatcttggcggcatgcagttgatgatcgaagagaatgggattatcagtcagcaggtgcccgggtttgatgagtggctgtgggtgctggcctatccggggattaaagtctctactgctgaagcgcgggcgattctgccggcgcagtatcgccgccaggattgtatcgcccatggtcgccacctcgcgggctttattcacgcctgctacacccgccagccgcagctggcggcaaaattgatgaaagatgtgattgccgaaccgtaccgaaccaaactgctgccgggctttagcgaagcgcgtcaggcggccatggagatgggcgcccaggcttgcggcatctccggctctggcccaacgctgttcgcgttgtgtgataaaccggataccgcacagcgcgtcgccgactggcttggcgcgcactatctgcagaatcaggaaggctttgttcatatttgccggctggacacggcgggcgcacgcgtagtgggataaccaatgaaactgtataacttaaaagatcataacgagcaggtcagctttgcgcaggccgtcacccagggacttggcaagcatcagggcctgttctttccgcacgatctgccggaattcagcctgactgaaatcgacgacatgctggcgcaggactttgtcacccgtagcgccaaaattttatccgcctttatcggcgatgagatcccgcaggatgtcctgcagcagcgggtgcgcgcggcgtttgcgtttccggcgccggtaagcaaggttcaggaagatgtcggctgtctggagctgttccatggccctacgctggcgttcaaggatttcggcggccgctttatggcgcagatgctgacccacatcgcaggcgataagccggtcaccatcctcaccgcgacctctggcgacaccggggcggcggtggcgcatgctttctacggcctgccgaacgtcaaggtagtgatcctctatccgcgcggcaagatcagtccgctgcaggagaagctgttctgtaccctcggcggcaatattgaaaccgtggcgattgatggcgactttgatgcctgccaggcgctggtgaagcaggcgtttgacgatgaagagctgaaggcgacgctgggtctcaactcggctaactccatcaacatcagccgcctgctggcgcagatctgttactacttcgaagcggcggcgcagctgccgcaggaagcccgcaatcagctggtgatttccgtgccgagcggcaacttcggcgatctgaccgccggtctgctggccaagtcgctggggctgccgatcaagcgctttatcgccgccaccaacgccaacgacaccgttccgcgctatctgcagggcggcgagtgggcgccaaaagccacccaggcgacgctgtccaacgccatggacgtcagccagccgaacaactggccgcgcgttgaagagctgttccgccgtaaaatctggcgtctcagcgagctgggctatgccgcggtcgatgatgagaccaccaaagcagcgatgcgcgagctgaaggccatcggctacatctctgaaccgcatgcggcgattgcctggcgcgcgctgcgcgatcagctgcagccgggagagtacggcctgttcctcggcaccgcccatccggcgaagttcaaagagagcgtggaggagatcctgcaggagactctgccgctgccgaaggagctggccgaccgcgccgacctgccgctgctgtctcacaacctgccggcggatttcgccgcgctgcgtaagctgatgatgggctaagccaggcaataatatcggcaacatgatcgaccaaaccgggcagctattgcccggtttttatatttaacgcactttttccatatcagcaaaatttctctccataaaattccccacactgttttattgtcagcgcactgcttttattgcaaactcttttacggattgtcatctttgccggataattccactggattatcttttttatttattatttcatgctgcttatatttatgctgctgattttattatgaagcagctatagatatcatttgttatagatgcattgttaatgcacaaggttttcaaggaggaaacatgcgtattttatctctttttttggtggtgttcgctttaacaggctgctccgggacaacgattggcggtaatgaagataaattaacgccagcctatctgaaacaacatctcattgtcggaaaaaccaccaaggccgaggttcgtcagtattttggtgccccggattctggtcatacgacggtgacggcgtcgggtaaagagagctggtattattcagtagataaagggatcaacctggtcagcctcgcgggttccatgatcccggtaaccggggcatcgcaagctgccgatgcggtcgataagtccagccaaaaagattcgaactcgctgatgattttcttcgatgaaaaaggcgtggtggaaaactgggtgcgttaaaataagtaataatctgcttaattatattgaaaaggggaataattccccttttttattaccgtaacgtgttactgctcgtggcgtttaaacaccagttcgcctttctctgaggcatccgcatcaaagaaatagccttcgctattaaaggctttgagctgctccggctgggttaagcggttttcaataatgtagcgactcatcaggccgcgggctttcttcgcataaaaactgatcactttgaatttgccgttcttctcatcgaggaataccggcttgatcagctgaccctgcaattttggcgttttcaccgatttaaaatattcatcggaagccaggttgatgacgatatcgtcgccctggtcgcgcagcgcctgattcagcttctcggtaatggtatccccccagaactggtacagatctttgccgcgcggattttccagacggatccccatctccaggcggtagggctgcatcaggtctaacgggcgcagcacgccatacagcccggagagcatgcgcagatgctgctgggcgaagtcaaagtcgtcctcggtgagtgtctctgcctgcaggccagtgtagacatcgcctttaaaggcgaggatcgcctggcgggcattttgcggcgtaaagtcagggtgccagtcgtggaagcgggtggcgtttagatccgccagcttgtcactaatgctcatcagcttgccgatttgcggtgcgctcagcttacgggcgatgccgataagctgctgagaatactcgaggagttcgggctgggtatagcgagtcgttgccagcgggctttgataatcgagcgttttagcaggtgaaatcagaatcagcatatccagtccttgcaggtaatttcgacgaattctaacaaaaaaagtgcatggtgggatcgatagctgcaattgccgcgctattcgcgcggcaattcattccaggcgcccggggccagctgttggtcaatatccgggtaacgagtggcatcgaaagtcggctggatacccagccgccgctgacgcagataatcgctggcgataatccgcaccgtcggggagagcagcagaatggccgtcaggttggtcatcgccatcagcgccatgatgatatccgcgctctgccagacgacaggcaggctaaccatggtccccaacagcaccatcaggacggtgagtattcgcagcccccagatatagcgcggcttatccaggcgcaggaagaccagattattttccgcgtacacgtaattggctacgatagagctaaaggcgaacagcagcacgatgagggcgataaaacccgctccccagccgccgaccagcacgctcatcgcgtgttgcaagtcctgaataccgttgagcgtatattcattgtcgggccgcggcgccagcatgacgataatcgcgcttgcggtacagatcacaatagtatcgataaacacgccaatcatctgcacgatcccctgcgccgccgggtgcggcggccaggaggcggcggccgcggcggcgttaggcgaagagcccatccctgcttcattggagaacatgccgcgctggaagccgctggtcagcgcctggctgatggtgtagcccaccgcgccggcggcggcctcctgccagccgaaggcgcagcgaaagatggtggcgaaaatcgtcggcagggcggtgatgtgccacaggccgatgagcaggctggtggcgatccacaacagcgccataaagggaacgatccattgcatcagacgcgccacgccgcgtaaaccacggaggatcgccagcaaaacgacaacggccagcacgccgccgctgaccgccgccggcagatcgaacgcatagcgcaaggcatgggccacggagttagcctgcacggtattgaagataaaaccataggccagcaggaggaggatcgaaaacaggacgcccatccaacgcatgccgagcccgcgcgccatgtaccaggccgggccgccgcgaaactgtccgcggctatcgcgttctttatacagctgagcaagggaacattcagcaaagctgctggccatgccgagcagggcggaaacccacatccagaatacggcgccgggcccaccggcggcgatcgccagcgtcaccccggcaagattgccgctgccgacccgggcggcaaggctggtacagagcgcctgaaaggacgttaaaccacccggctgcgggtgcaggcttttttttagactgcggccgaatttgcgcacgtaacgaaactgaataccccgggtttgccagctaaaccagataccggcgcccagtagcagataaatcatcactgagccccagagtatttcattgataaatgagagaaaatcaggcattaaacatcctcttgtccatgccggcacgccagtgtaagcgttaccaattaagtgacaatcctttcgctttcagcaaattaatctgcatagtttatcacactctgcgctcttctctcgacggcggttgcgctgacccggcagcgtgttatcatctgggcagaccggttacatccccttaactgctgtttaagagaaatatatcatgacggataaattaacttctctgcgtcagtacaccactgtcgtcgctgacaccggagatattgcggcaatgaagctgtatcagcctcaggatgccaccactaacccttccctgattctcggcgcggctcagatccctgagtaccgtaagctgattgacgacgctgtcgcctgggctcgtagccagagcagcgatcgcgcgcagcagatcctcgatgcttccgataagctggcggtgaacatcggtctcgaaattctgaaactgatcccgggccgtatctccaccgaagtggacgcacgtctctcctatgacaccgaagcgtctatcgcgaaagccaagcgcatcatcaagctgtacaacgacgcgggcatcagcaacgatcgcattctgatcaaactggcctccacctggcagggcattcgcgccgctgaacagctggaaaaagaaggcattaactgtaacctgacgctgctgttctccttcgctcaggctcgcgcttgcgccgaagcgggcgtcttcctgatttcgccgttcgttggccgtatcctcgactggtacaaagccaacaccgacaagaaagagtacgcaccggcagaagatccgggcgtggtttccgtcagcgaaatctacgagtattacaagcagcacggctatgaaaccgtcgtgatgggcgcaagcttccgtaacgttggcgaaattctggaactggctggctgtgaccgcctgaccatcgccccggcgctgctgaaagagctgtccgaaagcgaaggcgccgttgagcgtaagctggtatataccggtgaagtgaaagcgcgtccggagcgtattaccgaatctgagttcctgtggcagcataaccaggatccgatggcggtagacaaactggcggaaggtatccgtaagtttgcgatcgaccaggaaaaactggaaaaaatgatcgacgaactgctgtaatcgcgcaggtggccgacgcccgtcggccacattacactgtctgtcccgcctccggcagtgtatcatttcgtttaacgccacagtttgaacggaataaccatgaataccttacgaatcggcttagtttccatttccgatcgcgcctccagcggcgtctatcaggataaaggcatcccggcactggaagagtggctggcacgtgccctgaccacccctttcgagctgcaaacccgtctgattccggatgagcaggccatcattgagcaaacgctgtgcgaactggttgacgaaatggggtgccatctggtgctgaccaccggcggaaccggccctgcgcgtcgcgatgtgacgcccgacgcaacgctggcgatcgccgatcgcgagatgccgggcttcggcgagcaaatgcgccaggttagcctacactttgtgccgacggctatcctttcccggcaggtcggtgtgatccgcaagcaggcgctgatcctcaaccttcccgggcaaccgaaagcaattcaggagactctggaaggggtgaaagatgctgacggcaacgtgctggtgcacggtattttcgcaagtgtaccttattgtgtacagttgcttgaagggccttatgtggaaaccgatggccgtgtagtagaagcttttcgtcccaagagtgccagacgcgaaactttatcctgaatttgatgcatttttgatataacctgcatcgctaatggtgtgccgttttatttacgatatagtgctgtttactttacacactataaaacacgctgcacacctcaggatgaaattgcgttatgtcatatgtaaaccgaccgctcaaccgccaggattataaaacgctgacgctggccgccctgggcggcgcgctggagttttatgactttatcattttcgttttcttcgccgccgtcgtcggcgagctcttcttccctgcggatattcccgaatggctgcgccaggtgcaaacttttggcattttcgccgccggttacctggcgcgtccgctggggggcatcatcatggcccactttggcgatctggtggggcgcaagaaaatgttcaccctcagcatcctgctgatggcgctaccaaccctggcgatcggtctgctaccgacctatagctcggtaggtatcatcgccccgctgctattgctgctgatgcgtattctgcagggagcggcgatcggcggtgaagttccaggcgcctgggtgtttgtcgctgagcatgtcccggaaaaacgcattggtatcgcctgcggcacgctgacggccggcctgacggttggcattctgctggggtcggtggtggccacgcttatcaataccagtctgacgccgcaggggatccacgacggcggctggcggatccccttcctgctgggcggcgtatttggtctgatagcgatgtatctgcgccgctggctgcaggagacgccgatttttcttgagatgcagcagcgcaaagcgctggcgcaggagctgccggtaaaagcggtggcgctcaagcaccagaaggcggtggtgatctctatgctgctgacctggctgctgtcggctggcgtggtggtggtgatcctgatgtcgccggtctggctgcagaagcactatggttttgcgccggccattaccctgcaggccaacagcatcgccaccattatgttgtgcatcggctgtctgctcgccgggctggcggcggaccgcttcggcgccagccgcacttttatcgtcggcagcctgctgctggcggttgccagctgggcattttaccatcttgccggcgccagcccgcagcggctgtttctgctctacggtacggtggggctgtgcgtcggcgtggtgggggcggtgccctatgtgatggtgcgggccttcccggcggaagtacgcttcaccggcatctctttctcctacaacctgtcgtacgcgatctttggcggcctgacgccgattgcggtcaccatgctgatgggggtgtcgccgatggcgccggcctggtatgtgctggccctgtcgctgatggggctgggattaggtatctggctgcgtcaggagctgacggcgccgacggggatgccggaaggggagctgcagcgttaacgatggctagctgatgctgataatgacctgccgccgccctgtgaccggacggcggcggaagattagcgcggttcgccgatcggcagcacggtgcggccgaactgttcgttcagcacttcacccatcgccaggtaaatagcgctggcgccacaaatcaggccgacccagccggctaccttcacaatgccttcgttatcggccaaatggccaatcgccagcagcgcgaacagtacggtcaggctcaggaagacaaactgcagcatgcgggctgccttcagggtgccaaagaacataaacagggtaaagacgccccacaggccgaggtacataccgaggaagtgcgcgtttggcgcgtctgccaggcccattttcggcatcagaagaatcgccaccagcgtcagccagaagctgccgtaggaggtaaaagcggttaagccaaaagtgttgccttttttgtattccagcaggccggcaaaaatttgcgcaatgccgccgtaaaaaatccccatcgccaggatagctacatcgaatgcgaacaggccgctattcgccaggttaagcagaatagtggtcatgccgaagcccataaggcccagcggtgccggattagccaacttagtgttgcccataattcctcaaaattatcattaaaagggaagcattaccccgcgacttggcggcggggcgcggcataataatgaggcgctgaagggctgtctatgatctggcggggtatttttcaccaatttccgcggtgtctgacggcggctggagcatttgccgtaaacaggcgatatgcaggaccgcggggatggtgacccggtaggcgctgccgctcaccgctttcacgctgttcagcccggcgccgcgcaccaggccatgaccgatgacgctcaccgcggcgtgcgtgcgcaggatggcggttaagcgttcgtccagcaacaaagtgacgccttcgcttagcttgcgatgcctcagcagatgagccatcaggctgtccagctcatggctccggcactccaccgcggcgagaaactgcgctttttgctccgcgttcagtttattccagctgtgctgcagaaaatgcgccagcaactgctgctcgatctgcggcgtcgacagctgtttgtcgaccttcgctttcagtcgtttacatacatccagcaggatcgcgcgataaaatttgccatggcggcgtagcgtgttggcgatgctatcgccgccaaaatgctgtagctcaccggcgattagctgccagttgcggcgataacgctccgggtgcccctccatcgctaaaaatgtctcgttgcgcaggagcgtgctggagagacggggtttgccattttccccgtgggtcagaatgcgggtaaaggcttccagatgcgcctcgctgcactcaggcagaaaggcgagatcgtcatcctccaggtaattaatatgcataacgttttctctcgggcaggggcgacattagtcatcgccgataattttcagtgatgccatatctgaggagtgcaccgtgtggccggagaaggcgatcttcttcacgcaacgtttgttgtcgttatcgctattgatgttgatccagccggtggtgctgccctctttgatcccggcggggacgttcagcgtgtggctggcgccgcggctggccttaaagtagaccgtcgccccggagagttgtacatcgccgcggtcggcgctgagctgaatgcgtttgaccacccggcagacggggagcgtcagcgtcaggtcgttggtttcattgcgcggcatagctatcacgccgagaattttatggtcgttagcggccgccgaggtgataaatgacacgccgaggataagccctacggaaagccggtatagcgatttcattaatttgtcccctgaataagcgaagtgcgatggcggggaagtttatcactgcgaaaacggggcttttagcgcgcaagtattgcgggttatgtcaatgatattatgaatgtatttcctattttaatccgttttttgtatgtatatttcgccgtcgtttttgccatccaacaaccttgttcggcaagtcatccgtagccctgtgcgaatccgaggcaaaaaatttttatgcttgccccttgatgccggagtgggcgaccccatcttgtagtcaaccgcagtgaagaacctgaaaaaaaatgatgtctgggcagttgaaaccgcacgtttcgcccttattacaggttcacaaccacatgttgatcgaatttttagtggagacgtttagatgggtaaaattattggtatcgacctgggtactaccaactcttgtgtagcgattatggatggcactactgcacgcgtgctggagaacgccgaaggcgatcgcaccacgccttctatcattgcctatacccaggatggtgaaactctggttggtcagccggctaaacgtcaggcagtgacaaacccgcaaaacaccctgtttgcgattaaacgcctgattggccgccgcttccaggacgaagaagttcagcgtgacgtttctatcatgccatacaaaattgttgccgcagacaatggcgacgcatggctggatgtgaaaggcaccaaaactgcaccgccgcagatctctgctgaagtgctgaagaaaatgaagaaaacggctgaagattacctgggtgaaccggtaactgaagcggttatcaccgtaccggcttactttaacgatgcgcagcgtcaggcaaccaaagatgccggccgtatcgccggtctggaagttaaacgtatcatcaacgaaccaaccgcggccgcgctggcttacggtctggataaagaagtgggcaaccgtactatcgcggtttacgacctcggtggtggtactttcgatatctcgattatcgaaatcgacgaagttgatggcgaaaaaacctttgaagttctggcgaccaacggtgatacccacctgggcggcgaagacttcgatactcgtctgatcaactacctcgttgatgagttcaagaaagatcaggggattgacctgcgcaacgacccgctggccatgcagcgcctgaaagaagccgctgagaaagcgaagattgaactgtcttctgctcagcagaccgacgttaacctgccgtacatcactgcagacgcgaccggtccgaaacacatgaacatcaaagtgactcgcgcgaaactggaaagcctggtagaagacctggttaaccgttccatcgagccgctgaaagtcgctctgcaggatgccggtctgtccgtttccgatatcaacgacgtgatcctcgttggtggtcagactcgtatgccgatggtgcagaagaaagtggccgagttctttggtaaagaaccgcgtaaagacgttaacccggatgaagccgtggcgatcggtgctgccgttcagggcggtgtactgactggcgatgtgaaagacgttctgctgctcgacgtaaccccgctgtcgctgggtatcgaaaccatgggcggcgtgatgactgcgcttatcagcaaaaacaccaccatcccgaccaagcacagccaggtgttctctaccgctgaagacaaccagtctgcggtaaccatccatgtgctgcagggtgagcgtaaacgcgcgtctgataacaaatctctgggtcagttcaacctggatggtattaacccggcgccgcgcggcatgccgcagatcgaagtgaccttcgacatcgatgctgacggtatcctgcacgtctccgcgaaagacaaaaacagcggtaaagagcagaagatcaccatcaaagcgtcttccggtctgaatgaagaagaaattcagaaaatggttcgcgaagcagaagctaacgccgaatctgaccgtaagttcgaagagctggtacagacccgcaaccagggcgaccatctgctgcacagcactcgtaagcaggttgaagaagcaggcgataaactgccggctgacgacaaaactgccattgagtctgcgctgaccgcgctggaatcttctctgaaaggcgaagacaaagcggatatcgaagcgaaaatgcaggcgctggcgcaggcttctcagaagctgatggaaattgctcagcagcagcacgctcagcagcaggcgggttccgctgacgctcaggcgagcaacgcgaaagacgacgatgttgtcgacgctgagttcgaagaagtgaaagataaaaaataatcgccctttgaacgggtaaaacactggcacgggcgaagaggtttcctctccgcccgtgcacgcatgttaaggggctgaaaaacaccgatggcaaagcaagattactacgagattttaggcgtttccaaaacagcggaagagcgtgaaatcaaaaaggcttataagcgcctggccatgaaatatcacccggaccgcaaccagggtgataaagaggctgaagccaaatttaaagaaatcaaagaagcgtatgaaatcctgactgatgcccagaagcgtgcggcctacgatcagtacggccacgcggccttcgaacagggcggcatgggcggcggcggcggttttggcggcggtgccgacttcagcgatatctttggcgatgttttcggcgatatctttggtggcggacgtggtcgtcagcgcgcggcacgcggcgccgatctccgttacaacatggagctgacgctggaagaagcggtgcgcggcgtcactaaagagatccgtattccgacgctggaagagtgcgacgtctgccacggcagcggcgccaaggccggcagcaaaccgcagacctgtccgacctgtcatggcgcgggccaggtgcagatgcgccagggcttttttgcggtacagcagacctgtccgcactgccagggacgcggtacgctaattaaagatccttgcaataaatgtcatggccatggccgcgtagaaaaaaccaaaaccctgtcggttaaaattccggcgggcgtggataccggtgaccggatccgtctggcgggcgaaggcgaggccggcgaacatggcgcgccggcaggcgatctgtacgttcaggttcaggtgaagcagcacgctatctttgagcgtgaaggcaataacctgtactgcgaagttccgatcaacttcaccatggcggcgctgggcggtgagatcgaggtcccaacgctcgacggccgcgtgaacctgaaaattccaggtgaaacccagaccggcaagctgttccgcatgcgtggaaaaggcgtgaaatccgttcgcggcggcgcgcagggcgatctgctgtgccgcgtggtggtggagacgccggtggggctgaatgagaagcagaagcagctgctgaaagagctgcaggagagcttcggcggtccgaccggggaaaacaacagcccgcgttcgaaaagcttctttgacggcgtgaagaagttcttcgacgacctgacccgctaattccgcctttgttgatatccggcccgggcctttgctgcccgggctttttttcgccttagaactcccctttaactcgtaaaaagcgaatattagcgcaacttaaatctgattttttcgagttatcagtatgtgtattatgcttttatcgagttattcaccaacaggatgaaagtaaaagtgaaacatctgcaacgattctttagtagcgatgcttccggcggcattgtcttaattatcgccgccgcgctggcgatggtgatggccaataccagcgtgaccagcggtctgtatcactccttccttgatacgccagtacagctgcgtgtgggcgcgctggagatcaacaagaacatgctgttatggatcaatgatgccctgatggcggtgttctttttgctgattggcctggaggtcaaacgtgagctgattcagggctcgctggcgagccgccgtcaggcggtcttcccggtgatagccgcgctgggcgggatgatcgtcccggcgctggtctacctggcctttaacgcccaggatcctgtcgccagagaagggtgggcgatcccggcggcgacggatattgcctttgccctcggcgtgctggcgctgttaggtagccgggtcccgacggcgctgaagattttcctgatggcgctggcgattattgatgacctcggggctatcgtgattatcgcgctgttttatacccacgacctgtccatgctctcgctgggcgtggcggcggcggcgatcgcggtgctggtggccctgaatctgagcggcgtgcggcgtaccgggatctatattctggttggcgcggtgctgtggacggcggtgctgaagtctggcgttcacgcaacccttgccggggtgattgtcggctttatgatcccgctcgaagaaaagcatggcaagtcgccggccaaagcgcttgagcatgtcctgcacccgtgggtggcgtttatgatcctgccgctgtttgccttcgcgaacgcgggggtctcactgcagggggtcacccttgccgggctgacgtcgctcctgccgctgggcattatggctggcctgtttatcggtaagccgctggggattagcctgttctgctggctggccctgaagctgaagtgggcttcgctgccggagggaaccacctgcaagcaaattatggcggtggggatcctgtgcgggattggctttacgatgtcgattttcatcgccaccctggcctttggcagcgtggatcccgcgttgatcaactgggccaagcttggcattctgatcggctcagtgctatcagcggtcgtcggctacctcatactgcgtcagcgcgtgacggatactcgcctcgcggtataacctttctgcaggagagcccgccaggctctcctggacattatcagggagagaagcatgtcacatattaactacaatcatctgtactacttctggcacgtgtataaagaagggtccgtcgtgggcgcggcggaggcgctgtttctgacgccgcagaccattaccgggcagatcaaagccctggaggagcgcctgcaggggaaattatttaagcgaaagggaagggggcttgagccgagcgagctgggggagctggtttttcgctatgccgacaggatgtttaccctcagccaggagatgctcgacatcgtcaactatcgcaaagagtcgaacctgctgtttgacgtcggcgtggccgatgcgctctcgaaacggctggtcagcggcgtgctggatgccgccgtcgttgagagcgagcagattcatctgcgctgttttgaatccactcatgagctgctgctggagcagctgagccagcataagctcgacatgattatctctgactgcccgatcgactcgacgcagcaggaagggctattttcggtgaagatcggcgagtgcagcgtcagcttctggtgcatgaatccggcgccgacgaagccgttcccggcctgcctcgaagagcggcggctgctgatccccggtcggcgatcgatgctgggacgtaagctgctgaactggattaacgtgcagggcctgaaggtggagatcctcggcgagtttgacgacgcggcgctcatgaaagccttcggcgccgcacataatgcgatatttgtcgcgccgacgctctacgcgcatgatttctaccatgatgaatcgattgtcgaaattggccgtatggatagcgtgatggaggaatatcacgctattttcgctgaacgaatgattcagcacccggcggtacagcgtatctgtaatcgcgattattcgtcgctgttcaccgaaccccgatagccggaaggcgtgggctggcgtggctcagatcgcgccagcgtgcgctaccgggggaagatgataggcataaaaaaacccgctttcgcgggtttctttaacaaagttcagcaagcaggcgattaagccagtttgttgatctgtgcagtcaggtttgctttatgacgcgcagctttgtttttgtggatcagacctttagcagcctgacggtccacgatcggttgcatttcgttaaatgctttctgtgcagcagctttgtcgccagcttcgatagctgcgtatactttcttgatgaaagtacgcatcatagagcgacggcttgcgttgtgcttgcgagccttttcagactgaacggcgcgcttcttagctgatttgatattagccaaggtccaactcccaaatgtgttctatatggacaattcaaaggccgaggaatatgcccgtttagccttcttttgtcaatggatttgtgcaaataagcgccgtttaacaccacagcgcttcattacgtagtgatggcgcaagattctaccagcttgttgcaggcgaatacagcttttccaccataaaaatcgccgggcgcggccagttttcccgctttctcgcgctgagtgaatgaattcctgagaactttcgttgccgaggtgcaatcgctggttaacgttgacagttgtacaaggtatactcggacgattttcactgttttgagccagacatgaagctgatacgcggcatacataatctcagtcaggccccgcacgggtgcgtgctgaccattggtaatttcgacggcgtgcatcgtgggcatcaggcgctgctgcagcggttgcgcgaagagggccgccagcgcggtttaccggtcgtggtgatgatttttgaaccccagccgctggagctctttgccgctgataaagccccggcgcgattgacccgcctgcgtgaaaagctgggctatctggctgaaagcggggttgactatgtattgtgcgttcgctttgaccgccggttcgccgcgctaaccgcgcaggattttatcagtgaactgctggtgcgtcgcctgggcgtgcagttcctcgccgttggtgacgatttccgctttggcgctggtcgccagggggatttcttgttattacaaaaggcgggggcggaatatggcttcgacgtcaccagcactcaaaccttctgcgaaggcggggtgcgaatcagcagcacggcggtacgccaggcgctggccgatgacgatctcctgctggcggagacgctgctcggccatccgtttagcatctccggacgcgtcgtgcatggtgatgaactaggccgaaccataggttttccgacggcgaacttaccgctgcgtcgtcaggtttccccggttaaaggggtctatgcggtagaagtgacagggctgggcgacaaaccgatagcgggcgtcgccaatattggcacccgtccaacggttgcgggcgtgcgtcagcagctcgaagtacatctgttggacgttgtaatggacctctacggtcgccatatcaatgtaatactgcgtaaaaagatacgtaacgagcagcggtttgcgtcgctggacgagctgaaggcgcaaatcgcacgtgatgagttaacggcccgcgaattatttgggctgaccagccaggcctgagccactggtgtttatcaaaccgaaatacggaaccgagaatctgatgagtgactataaatcgaccctgaatttgccggaaacagggttccctatgcgtggcgacctcgccaaacgcgaaccgggaatgctggcgcgttggaccgatgatgacctgtacggcatcattcgtgcagccaaaaaaggcaaaaaaaccttcattctgcatgatggccctccttatgcgaatggcagcattcatattggtcactcggtaaacaagattctgaaagacattatcgttaagtccaaaggactgacgggctatgactcgccttacgttccgggctgggactgccacggtctgccgatcgagctgaaagtggagcaggaatacggcaagccgggtgagaaatttaccgctgccgaattccgcgctaagtgccgcgaatatgccgccgagcagatcgatggccagcgtaaagactttatccgtctcggcgtgctgggcgactggtcgcatccgtacctgaccatggacttcaaaaccgaagccaacatcatccgcgcgctgggcaaaatcatcggtaatggccacctgcataaaggcgccaaaccggtgcactggtgcgtagactgccgttccgcgctggcggaagcggaagtggagtattacgacaaaacctctccgtctatcgatgtcgcgttccacgcggtagacaaagccgcggtactggcgaaattcggcgtagccgacgtcaacggtccggtgtcgctggttatctggaccaccacgccgtggaccctgccggccaaccgcgctatctctctgtctcctgagttcgactatgcgctggtgcaggttgacggccaggcgctgatcctggcgaaagacctggttgagagcgtaatgaagcgcgttggcgcgacggactacactattctggcggcggtacaaggttctgagcttgagctgatgcgctttaagcatccgttcctcgatttcgacgtgccggcgatccttggcgaccacgtgacgctggatgccggtaccggtgcggtgcataccgctggcggccacggtccggacgactacaccatcagccagaaatacggtctggaaatcgccaacccggttggcccggacggcgcttacctgcctggcacctggccgtccctggacggcattaatgttttcaaagccaatgacatcatcgttgagatgctgcgtgagcgtggcgcgctgttacacgttgagaaactgcagcacagctatccatgctgctggcgccacaagtcgccgatcatcttccgcgccactccgcagtggttcgtgagcatggatcagaaaggcctgcgcgcgcagtcgctgaaagagatcaaaggcgtgcagtggatcccggactggggccaggcgcgtatcgaatcgatggtcgctaaccgccctgactggtgtatctcccgtcagcgcacctggggcgtgccgatgtcgctgttcgtgcataaagaaacccatgaactgcacccgcgtacccttgagctgatggaagaagtggcaaaacgcgttgaagttgacggcatccaagcgtggtgggatctcgattcccgcgacattcttggcgatgacgccgacagctacgagaaagtgcctgataccctcgacgtctggtttgactccgggtcgacccactcttccgtggttgacgtgcgtccggaattcgccggtcacgccgccgatatgtatctggaaggttctgaccagcatcgcggctggttcatgtcctcgctgatgatttccacggcgatgaaaggcaaagcgccatatcgtcaggtactgacccacggcttcaccgtcgacggtcagggccgcaaaatgtccaagtctatcggcaacaccgttagcccgcaggacgtgatgaacaagctcggcgccgatatcctgcgcctgtgggtggcttccaccgactacaccggcgaaatggcggtctctgacgagatcctcaaacgcgctgcggacagctatcgtcgtatccgtaacaccgcgcgcttcctgctggcgaaccttaacggtttcgatccggtgaaagacatggttaaaccggaagagatggtggtgctggaccgctgggcggtcggctgcgcgcaggcggcacaggaagatatcctgaaagcctacgaatcctacgacttccatgaagtggtgcagcgcctgatgcgcttctgctccatcgagatgggctcgttctacctcgacatcatcaaagaccgccagtacaccgccaaggcggacagcgtggcgcgtcgcagctgtcagaccgcgctgttccatatcgtggaagcgctggtgcgctggatggcgccgatcatgtccttcaccgcagatgaaatctggggctatctgccgggcgagcgtgagaaatatgtcttcaccggcgagtggtatgaaggtctgttcggcctggccgacgacgaagcgatgaacgacgatttctgggatgagctgctgaaggtgcgtggcgaagtcaacaaggtgatcgagcaggcgcgtgcggataagaaagtcggcggctcgctggaagcggcagtcacgctgtatgctgatgccgatctggcggctaagctcaatgcgctgggcgatgaattgcgatttgtcctgttgacctccggggcgaacgtcgcagactatgcgagcgcgtccgctgatgcgcagcaaagcgaactgctcaaagggctgaaagtcgcattgagtaaagctgaaggtgagaaatgcccgcgctgctggcattacaccaccgatatcggcaaggtggcggaacacgcggaaatctgcggacgctgtgtgagcaacgtcgccggtgacggcgagcaacgtaaattcgcctgatgagtaaatcgatctgttcaacggggctacgctggctgtgggtggtcgtagccgtgctgattatcgatctgggcagcaaattcctgatcctccagaacttcgctctgggggagacggttccgctgttcccgtcgcttaatctgcattatgcccgcaactatggcgcggcctttagcttcctcgccgacagcggcggctggcagcgctggttcttttccgggatcgcgatcggcatttgcgtggtgctgacggtgctgatgtaccgttcgaaggcgacgcaaaagctgaacaatattgcctacgcgctgattatcggcggcgcgctgggcaacttgttcgatcgcctgtggcatggctttgtggtcgatatgatcgacttctacgtcggcgactggcattttgccaccttcaacctcgccgatagcgcgatctgcatcggcgcagcgctgattgtgctggaaggcttcctgccgaaaccgactgtgaaagagcaggcgtaaatctcaatgccgggtgacgtgacgcttacccggcctacagaatttttggctcccgtaggcccggtaagcgtaatgccgccgggcaccaggtgacctaaacaagcgagcaatttgcatgtctaaatccgtacagagcaacagcgcggtactggtgcacttcactctgaaactggacgacggctccactgccgagtccacccgcagcaacggcaaaccggcgctgtttcgcctcggcgacacctctttgtctgaagggctggagcaacagcttctcggtttgaaagagggggagaaaaaggccttttcgctggagcctgacgccgcctttggcgtacccagcccggacctgattcagtatttctctcgccgcgagtttatcgacgctggcgagccggagatcggcgcgattatgctctttaccgcaatggatggcagcgaaatgcctggcgtgatccgcgaagtgaacggcgattccatcaccgttgacttcaaccatccgctggccgggcgcactgttcattttgatattgaagtgctggagatcgatccggcgctggaggagtaacatgcagatcctgttggctaacccgcgcggtttttgcgctggcgttgaccgcgctatcagcattgtagaaaacgcgctgacgctgtatggcgcaccgatctatgttcgtcatgaagtggtgcacaaccgctatgtggtggatagcctgcgcaagcgtggcgccatttttatcgaacagatcagcgaagtgccggacggcgcgatcctgattttctccgcccacggcgtgtcgcaggcggtacgcaacgaagcgaagagccgcgacctgacggtgttcgatgccacctgtccgctggtgaccaaagtccatatggaagtcgcccgcgccagccgccgcggcgaagagtcgattctgattggccatgccggccatccggaagtcgaaggcaccatgggacagtacaacaacccgcaaggggggatgtacctggtcgagtcgccggaagacgtgctgaagctggaagtgaaaaatgacgcccggctgtcgtttatgacccagaccacgctctccgtcgacgatacctcggatgtgattgacgccctgcgcgcgcgttttccgaaaatcgtcggcccgcgcaaagacgacatttgctatgccaccactaaccgtcaggaagccgtgcgcgcgctggcggagcaggctgacgtagtgctggtggtcgggtcgaaaaactcctccaactctaaccgcctcgccgagctggcgcagcggatgggtaaggcggcttacctgattgacgacgcctccgatatccaggaagcgtgggtcaaggatgcggcctgcgtcggcgtgacggcgggcgcgtcggcgccggatattctggtgcagaacgtcattacccgcctgcaggagctgggcggcggcgaagccgtgccgctggaaggccgggaagagaatatcgtctttgaagtgccgaaagagctgcgtgtggatgtccgtgaagtagagtaagttctttcctccagcagtatgagaagatgccagacttaacgtctggcatttttttagggagaaaccatgcgcttaccaatcattcttgataccgatccgggcatcgacgatgccgccgccattgccgcggcgctgttcgcgcctgagctggatctgcagttgatgaccaccgtagcgggcaatgtctcggtggagaagacgacccgtaacgcgctgcaattgctgcatttctggaatgccgatgtaccgctggcgcagggggcgtcgatgccgctggtgcgtccgttgcgcgacgccgcctcggtgcatggcgaatccggcatggaggggtatgactttgttgagcatcaacgtcaaccgctggcgaagccggccttccaggcgatccgtgatgcgcttatgcatgctgccgagccgatcaccctggtggcgattggcccgctgaccaatatagcgctgctgctgacccagtacccggaatgcgtgtttaatattcgccggctggtgatcatgggcggctcggcgggccgcggcaacttcacgccgaatgcggaattcaatatcgctatcgacccggaagccgccgcgaaagtgttccacagcgggctggagattgtgatgtgcgggctggacgtcaccaaccgggcgctgctggcggcggattatctggcgacgctgccgacgctgaaccagaccggtaaaatgctccatgcgctgtttagccactatcgcagcggcagcatgagcagcggtctgcgcatgcacgacttgtgcgctattgcgtggctggcccgcccggaactgttcactctccagccgtgctttgtggcggtggagacgcaggggacctggaccgccggcaccacggtggtggatatcgaaggacgactgggccagccggcgaacgcccaggtggcgctggatatcgacgtcgaagggtttcagcgctgggcggcggaggtgattgccctggcgccgtgatatatcactcgattttcaaggagagaagcaatgacctatggacaggcgtatttgagcggctggaaagagacctttaactttagcggacgcgccagtcgacggcagttctggacgttttttctcaccaatgtattgatcgccaccgcgccgctggcggcctggtgtctggcaaccagcgttaaccctcaatacggcatcctcagttttgttgtcattccctttgccgcgctctggctgctgttgatggcgatccccctgctggctgtaggctgccggcggatgcatgatatcggccgctccgggatctggtttgtgttgggggttatcattccgtggtttgcaattatttcgctggctctgtgctgcctgcgctcagcgccggcaccgtctcgctgagataatcgatcatcgcccgcatcctggcgggcatatgcttatctcccgcccacagtagccacaggtcgcctgagtagctgctgataaattcccactcgggcaacacctgcacgatgtcgccgttcgccagcgcctcacgggcggtgaacagcggcaggctgccgatccctaaatgctgtctgaccgcgtcgaggcgtacggcggtatggttggcggcgtaccgcccgtaggtttgcaccgtttctgttttgccttcccgacggaacttccagcgagcatcggcgggcgtttcgccaaggctaatgcagctatgcgcgcgcagatcctgcggcgtgtacggcgtaccgtgctgctgtaaataggcctcagtggcgcagataacgtgcctgattggcatcagcggtttgccatgcaggccgggggagggggtatcggtgatgcgtagcgccagatcaataccgtcatcgataaaatcgagagggcgatcttccagccgcaggcagacgtccacctgcgggtagcggtggaaaaacgccatcatcagcgggtggatcacaaagcggccgacggctttcgggacgctgagcgtcagctttccctgggcgaccgtttggcgactgcctgcggaatccattgcctgtcgcgccgcttccagcatctgctgggcatgctgatatatcgtttccccggcatcgctaagacgcagcttgcgggtggtacgctgcagcagtttgcagcccatctctcgctccagccgtgaaacgctgcggctaacggctgaaggggtaatgccgttctggcgggcgacggcggagaagctgccctggtcgactatctgaacgaaaagagcgaggtcgggcaggaggttcagattcatttgtgctcccggagcaagagtgcattggcgggtggtgggattatcgctgtcggcattaataatatactgggcggacagagaggagaatcactatgactgaacgggtttattacaccagcgatgctaccgacgggcgcgcccagatcattgcctgcactgcagaagcggatggccgttacgccatcgaactggatcggacgctgtttcacccgcaagggggcggtcaaccggcggaccgtggatggattgccgggcaggtggttgagacggtggttgtgcgcggcgaaagggtgctgcatattctgtcgcaaccccttcccctcggtgaagtggagatgaaaattgatgcctccgcgagacagctgcatgctcgtctgcattctgccggccacctgcttggcctggcgggcgaacagcttggctggcaaccggtgaaagcgcaccactggcccggcgaagggcggataacctttgccagcaggaatagcgccgcgctgccggacgccagtgcgctactggcgctagtgaaggcatggcaggcgcaggacttaccgcgtcaggtgacgttcgctgatggcatgcgcaaggtgggattcggcgagctgccagcctatccctgcggaggcacccacgtcgcccgtctggcggagctgggcgacattgtcattagtcagattaagatgaagaaggggcagctggtggtcagctacaccctggcgtaagcgttttatctctgctcaggataggtctgcttgccgtgatagatacgctcaggtcggccaaccttgccgtagctgatttccgcttccagaaagtcgttcttcactccttgttccagataacggcgagcggtggttttgctgctgccgaggatacgggccagcgagtcggcggtatgcaccaccgtcgggtcggcaaacagctggagcacgcgctgaaaggtgctttcatcgatcccgcgcagtggtgcgctggcgggttccgtttgttcccgggcctgaatattaaacagcgcgtcgacatggagctggctggcctgttcactggagcgcagcgagcttcgatagcgagcaaagcgctccagcgtgtgctgcaggcgctgatagtgcaccggcttaatcaggtaatcaaacaccccaagacgcagcgcttcgctgatggtttccatgtgattatccgcggtaataaagataatccgtcccttgtaatgtgtactgactgcatggcggatcagatcgatacctttgccgtcgggtaaaaaattatccagcaggatcagctgcggttgatacagtctgagctgtttcctggcgctctcaagcttatccgcaataccaatgacgtcgaaccggggaaactgtttaatgttatccaccaggatctccgccagcataggttcgtcttcaacaataagagtagtgatgctatccatgatgttcatctcgggtcagggggatataaagcgtaaaaatggtgccaaaaggaatattattttcgacgacgatactgccgcctgcttgttccacgtagctgcgtactagccagagtccgataccatgatctttgctggcgctgctggtgacgccgcgctcgaagatccgatcgcgcagcgcctcgtcaatgccgcatccctggtcggcgatctcaatgatcacctcctggccatcactgttgatcaggcattcgatctgttttgaaccctgcggttgacgcaggctggcattgtaggcgttatcaagtagattccccacgatcgagatccattcgttgtgcgaaagggcggtaggtaatctatcaacgaagcaggccggatcgaaaatcagctcaagtccaagctctttggcccggtaatatttgccgatcaacagcccggccaggtggttgtcctggaaattgcgtgcaataaaatcgatcaccttctggtgactttccgactgctgttggatcagttccagcgcttggttatagcgtttaagaaacagcagaccggcgatagtggagatcagattgcgatgctcatgctgtacggcgcgcaggttatcggcatattgttgtacctggctaagctgcaggctaagggtgttgatatcgtctttgctgcgaaagctgatcacccagccctgtggctcattgtttaagatcaccgccatccggctggcgatcactttgatctgattgaaggtaacgatctcgtcttttttattggtctgtggcgcatcgtagaagaagacctcctgcgagataacgctgctgatccgtttgccgataagcgtcggttccggctgactcaaattgagcaggcgacgcgcagtctgattaatcgcagtgattttataatcggagtcgatggcgataagcccttcgaacaccgattcaaacagcacgctttgctggatcaacagctgtgacagctgctggggttccatattgagcatctgttttttgatatgcagtgagaagcggcgggcgcaaaagagcagaagcagtaacatgatggccatcgggatcagcagcgaacttatctgcaggctgagccagttttccagttgctcaatggtatagcctaccgacacaatgccgatcaccttgccggttgcgtcctgaatcggcgatttaccgcgcagcgacgatcccagcgagcctttgcgcactgacacgtagcttttagcgtttatcaacgcctcatcgctatcgccgccttccatcgatttgccgatttcatcaggattgacgtgatagaggcgctggccgctggcatcaccgacggtgatgtaggtggcgtcggagaacgaacgcatggggtcgataagggctttgattctggcgagatcgcgtttctgcactgcctccaccagctccggcatcgccgaaatctgcatcgcctgaatcagcgcccgttgcccgacctgataatgcagacgctcctcggtaatgtctgtcagataccatgacatcgccagcatgacgatcgtcgaggtgaataagatcagcaggaagatgcgattctgaaacgatcgcctggcaaaccagtgggtgatttttcgggtatacattgggtagatagacattaaattgttattctccccgttttgcgcccccggcgccgacaggtggagcacagaacagaaaatttcagacatgtgcccggccccgtcatgccaagagtgggtatcaaatcagcccggaggtggggcgacagccacacctccgggaaggatgtcggcctacatcgccagcacgtacttgagcatcaccccggcggcgatcgccgagccgatcacccccgccacgttcgggcccatcgcgtgcatcagcaggaagttctgcccgtccgcttccagacccaccttgttcgacacccgcgccgccatcggcaccgccgacacccccgccgagccgatcagcgggttgattttgtgccggctgaacacgttcatcagcttcgccatcagcaccccggcggcggtccccacgcagaaggcgatcacccccagcaccaggatccccagcgtctgcggctgcaggaacttgtccgccaccagcttggcccccaccgacagcccgaggaagatggtgacgatgttgatcagcgcgttctgcaccgtatcgctcagccgctccaccacgccgctctcgcgcatcaggttgccgaagcagaacatccccagcagcggcgcggcgtccggcagcaggagcgccaccagcagcaacagcaccgccgggaagaggatcttctcccgcttactcaccgtgcgcagctgcaccatgcggatcttccgctccttatccgtggtcagcgccttcatgatcggcggctggatcagcggcaccagcgccatataggagtacgccgccaccgcgatggcccccagcagctccggcgccagcttgcccgacaggtaaatcgccgtcgggccgtcggcgccgccgatgatgccgatggccgccgcctgcggcagggtgaagctgatgatgccgaagtagttcagcgtcagcgccccgagcacggtggcgaagatcccgaactgcgccgccgcccccagcagcagggtgcgcgggttagccagcagcgggccgaaatcggtcatcgctccgacgcccataaagatgaccagcggcgcgatgcccgagccaatcgccaccttatagaagatggccagcaccccggcggagtagcccatgtccaccgcgaggctctccatctgcccctgcaccgacggcagggccagggccagcgccgccttaatggcgtggacgtccggcgcgcagtggagcttcgcggcaatcaccgccagctgcgccgggtcgtggtgggccagcaggctctccagggcggtgagcgccagcccggcctccggaatattggagagcaggccgccgaagccaatcggcagcagcagtaacggctcgaacttcttcgcaatcgccagccagagcagcagcaggctgaccagcagcatcaccgcctggccggcgccgaggtgcatcagccccatgccctggatcagggcgttcagactttccatttccgctcctcgtccttacgccagagtcatcagggtgtcgccgaccgccaccgcgtcaccggctttcaccgcgataccgcgcacggtcccggcctgcgcggcgcggatttcggtttccatcttcatggcttccagaatcagcagcacttcgcctgcggccaccgtctggccttcgctggccagcaccttccagatagtgcccgccagcggggcggtcaccggggtaccggcgccggccggggcggcagcggcgggtgcagaggcaggagcaggagcaggagccggagcagccgccgtcagctggctgacgtcaccgccgtcgctgactttgaccacaaaggctttgccttccacctccacggtgtagacgccggaggcggcaggtttttctgcttttgccactggctgcgcggcttccgcctgcggtaccggctcaaaggccgccgggttgtggcggttttcgaggaacttcaggccgggttgcgggaacagcgccacggtgagcacgtcgtcgatggcgttttcggcaagcgtgatgcccttctcctgtgcctggcgtttcacatccgcttccagctgcgccagctccggcttcagcaggtcggccgggcggcaggtcaccgggtcggcgccgtcgagcacccgcgcctgcagggcggcgttcaccggggccggggtgcggccgtactcgcctttcaggataccggcggtctccttcgcgatggttttgtagcgctcgccgcccagcacgttgagcaccgcctgggtgccgacaatctgcgaggtcggggtcaccagcgggatgaagccgaggtcctcgcgcacgcgggggatttccgccagtacttcatccagacggtgggcggcgctctgctgcttcagctggccttcaaggttggtgagcatcccgcccggcacctgggcgacgaggatacggctgtcggtgcccttcagctggccttcgaaggcgtggtattttttgcgcacctcgcggaagtaggcggcgatgctctccagcctgtggatatcgaggccggtgtcgtacggcgtgccggcgagggtggccaccagcgcttcggtggccgggtggccataggtggcgctcatggacgaaatcgccgtatccacgccgtcgaccccggcttcaatggccttcagcagcgccatctccgccatcccggtggtggcgtggcagtgcaggtgcagggtgacgtcatagcgcttcttgatttcgctgaccagctcaaaggcggcatgcggcgtcagaatgccggacatgtccttgatggcgacggagtcaacgccggtctccagcagctgttcggtgaggtcgagccaggtctgcagggtgtgcgccgggctggtggtgtacgaaagcgtaccctgggcgtgggcgccgtggcggcggaccgcctgcagggcgggctgcatgttgcgcgggtcgttcatggcatcgaagacgcggaagacgtccatgccgtttttgacggcgcgctcgacgaagcgctccaccacgtcgtcggcgtagtggcggtagccgagcaggttctggccgcggagcagcatctgcagcggggtcttgggcatcgcctttttcagctcgcgcaggcggacccacgggtcctcgccgaggaagcggatgcaggcgtcaaaggtggcgccgccccagcactccagcgagcggtagccgacgtcgtccagctgagcggcaacgggcagcatatcgtcgagacgcagacgggtggcgaacagggactggtgggcgtcgcgcaggacgacatcggtaatggcaacggtcatgaattcctccgtgaattaagggtgaagacggcgatggtggtgaatggcggcgacaatcgccggcttcaggcgggcgaaatcgtcggcgggcgcgacggcggccggcgccggtttgggggcggcaggcggctcaggaaacaggcggttgacggcgagggacattccccggatggcgaaaatgagcagcagcaggaacaccagcacaaagcccatgccgagacacatcagggtgaagccttcgcctaacaggacggcattgtcagtcatttatacatctcaaataggggcacgatgacgcgctgtctgacaaggtttctggctaaggagcagggtggatttccctctgccgctcccggcatgggaccctgattcgttcttcacctgtcagttcaacgtgccatcgtgcgtatgggttaaatcatcatgccgaacacgatgctggcgatgaccagcacaataccgccgcccaaacgggaggagatttgcgcataagagataaggttcatacggttacaggcagagagaacttccaggtcgccggagccgccgcggttggccatacacaggcctgcagtgatggccgattctattgggaagaagcccatcagccagccaccgatcgccgcgccgagcaccgcaccgataacgataatggcggcgataacaacgttagcgaaggtgatggcgttgataatttcctgtaggtcggtgtagcagacgccgaccccgaccatcagcacccacagcagctgtttggagaagaaatcagacaagcgtttagcaccggctttgatttccggtgagcacagcccggaggcgttcagcgcggcgacgatcagcaccatccacgcgaaatagtgaatagccacaccgccaatgctgggcagaattttcttcgccacgacgtaggccagcaggaagcaggtagtggacagcaccagaccgacggcggtttcgcgatgggtgatttgtcccgctttctcatcttcttccactttgaacgaggctttacgcaccagttccccttcgccgctcagccaggtgtgttttttgccgatgatatcgaggacggcggcaaagacgatggcgaagatgttagcgatggtcagaatagcgatagcggttgagtaatactcttcgcgagaacgaccggtgacggagtggtaaatctccgacaaggggaccgcgcccgcgccgttgccgccgcccatgatcggcaggacgtacagcatcatgatgcgatccactggaataccgaacaccaggccgatagcgatgccaaaaatagacgcgccgacaatgcccatcaggatagttggaatatagccgagcagtgatttcagcagcaggcggcggtttaccgacagaattgctccggtaattaataccgcgatgaataagttaaggaagttactcttatccataacgttgctgatagcatcgatttctttctgcgtaaaaataccggcatagacaaaataagccgccaccaggaaaatcatcaccggagcgccaccgatatatttgttgaatattggcaggcgcttgccaatttccccgaatatagcgccgataataaacatgatggcaaagccgccgacgatatcggtgggtaatgcgttataaaaatgtgaaagtaatagtgtaattaacgcaaatgcgtaaagggggagcggcatgccgaagattttaaatcccagcagatcgctaacgccctttttctccgtcgccggagcctgactcatgttagtcataaacgttaccctgtttattgatggagtagtaagaccggcgcatagtaataaatagacccaggggtaaggtgtgattatcttcactgaatactcgtgttttttattaatttaattgtttttatgattctgaattaattaacaacataaaaaccataaagccaattaagccacgagaaaaactgtgacttaaatacaagaatccatagccgaacgctggcgaaatacagttcgttttgaaatgacgaagcgctaaaaaatgacactgatattaaaacgcgttcagctattaaaagataaaccgcggcgagaggcgatcgatcggtttctccgccagcatcaactgtcgttagaggccgactgcgaaatggcgattatcgccgagtatcagcagcggctggtcggctgcggtgctatcgccggcaatgtgctgaaatgcatcgccatcgatccctcgctgcagggggaggggctgagccttaaattactgaccgagctcctgacgctggcctatgagctggggcgcagcgaactgtttttgttcactaaaccttgcaatgccgcgttattttccggcgccggcttctggccgatagcccaggcgggcgaccgcgccgtgctaatggaaaatagccgcgaacggctgactcgttactgccgacagctggcgatgtaccgtcagccgggaagaaaaatcggcgctatcgtgatgaatgccaatcccttcaccctcggccaccgctggttggtagaacaggcggccagccagtgcgactggctgcatctgtttgtggtcaaagaagatgcgtcctgcttttcctatcacgatcgcttcaaactcattgaacaggggattaccggcatcgataaggtgacgctgcatcccggttcggcgtatctgatctcgcgggcgacgttccccggctatttcctgaaagagcagggggtggttgatgactgccacagccagattgacctgcagctcttccgcgagcgcctggccccggcgctgcagattacccaacgctttgtcggcaccgagccgctgtgtcccctgacccgtaattacaaccagcgcatgaagtcactactggaagcgccaggcgacgcgccgcccattgaagtagttgagcttgcgcgaatcgaaaaaaatggtggacccgtgtcggcctcccgagtgcgcgaactctatcgacagcgcaactggcaggcggtcgcggcgctggtgccgccggggaccctctcttttctgatgcaactggcggagagcgaacatcaaaccgcctgatttttatgccctaactaaggattttcccctatggaaatgaagattgacgccctggccggcacgctggagtccagcgatgtgatggtcaggattggaccggcggcgcagccgggcattcagctggaaatcgacagcattgtgaaacaacagtttggcgctgcgattgagcaggtagtgagagaaacgctggctcagcttggcgtgaaacaggccaacgtggtggtcgatgataaaggcgcgctggaatgtgttttgcgagctcgcgtacaggccgcggcgctgcgcgcggcgcaacagacccaattacaatggagccagctatgaaaccacgtcgcagtatgttgttcatccctggcgccaatgccgccatgttaagcacgtcattcgtctacggcgctgatgcggtgatgttcgacctggaagatgccgtttcgctgcgcgagaaagataccgctcgtctgctggtgtatcaggcgctgcagcatccactgtatcaggatatcgaaaccgtggtgcgcattaacccgctgaatacgccgttcggtcttgccgaccttgaagcggtagtccgcgcgggcgtggatatggtgcgtctgccgaaaaccgacagcaaagaagatatccatgagctggaagcgcatgttgagcggattgaacgcgagtgcggccgggaagtgggcagcaccaagttaatggcggcgatcgagtcggcgctgggcgtggtgaacgcggtggaaatcgcccgtgccagcccgcgtctggcggcgatcgcgctggcggccttcgattacgtgatggatatgggcacctcccgcggcgacggtactgaactgttctacgcccgctgcgctgtactgcatgccgcccgcgttgccggcatcgccgcctatgacgtggtgtggtcggatatcaataatgaagagggcttcctggcggaagcgaatctggccaaaaacctcggctttaacggcaaatcgttggttaacccacgacaaattgaactcctgcatcaggtctatgccccaacgcgcaaagaggtcgatcacgcgctggaagtgattgccgcggcggaagaagccgaaacgcgaggtctgggtgtggtatcgctgaacggcaagatgatcgatggaccgattatcgaccatgctcgcaaagtggtggcgctctcggcttccggtattcgtgattaaggggaataagatgaaagagacagtagcaatgcttaatcagcagtacgtgatgccgaatggactgacaccttatgccggcgtaacggcgaaaagtccctggctggcgagtgagagcgaaaagcgccagcgcaaaatctgcgattcgctggaaacggcaatccgtcgctccagcctgcaaaacggcatgaccatctcgtttcaccacgcgtttcgcggcggtgacaaagtcgtcaatatggtagtggcgaagctggcggaaatgggttttcgcgatctcaccctggcatccagttcgctgatcgacgcccactggccgctgatcgagcatattaaaaatggcgtgatccgccagatctacacctccggcctgcgcggcaagttgggcgaggagatctccgccggtttaatggaaaacccggtgcagatccactcccacggcggtcgcgtacagctgattcaaagcggcgagctgtcgattgatgtcgcgtttctcggcgttccttgctgcgatgagtttggcaacgccaacggctttagcggtaaatcacgctgcggttcgctgggctacgcgcgcgtcgatgccgagcacgctaaatgcgtggtgctgctgaccgaagagtgggtggattatcctaactatccggccagtattgcccaggatcaggtggatctgatagtccaggtagatgaagtcggcgatccgcaaaaaattaccgcgggtgccatccgtctgaccagcaacccgcgcgagctgctgattgcccgccaggcggcgaaagtcgttgagcactccggttactttaaagagggtttctcgctgcagaccggtaccggcggcgcctcgctggcagtaactcgcttccttgaagataaaatgcgccgtaacggcattaccgccagcttcggcctcggcggtatcaccgggacgatggtcgatttgcacgaaaaagggttgatcaaaacgctgctcgatacccagtccttcgatggcgacgcggcgcgttcgctggcgcagaacccgaaccatgtcgagatctccaccaatcagtatgccagcccgggctccaaaggcgcctcctgcgagcgcttaaacgtggtgatgctcagcgcgctggaaattgatatcgactttaacgttaacgtgatgaccggttctaacggtgtgctgcgcggggcgtccggtggccatagcgataccgccgccggtgcggatttgaccattattaccgcgccgttagttcgcggccgtattccctgcgtcgtggaaaaggtgctgacccgcgtcacgccgggggccagcgtggatgtgctggtcactgaccacggcattgcggtcaacccggcacgtcaggacctgatcgacaatttgcgcagcgcaggcattccgctgatgaccattgaggaactgcagcagcgtgctgagctgttgactggcaagccgcagccgatcgaattcaccgatcgggtggtggcggtggtgcgctatcgcgacggttcggtcatcgatgtgattcatcaggtgaaaaacagcgactaaacgcagaggggaaaggccatgagcgacgtgttaattaatcctgcgcgtgtgcggcgcgtgaagccactgagtgccgaagaggtggtcagcgcggtagagcgcgcgctgttgaccgaagttcgcctgaccccaaagcccgggttggtggatattcgtaacgctggcgcgcactgggatatggatctggcctcgtttgaggccagcaccgcggtggtggctccgtggatggagaaatttttcatcatgggccacgatactgcggcggtcgcgccggagcatgtattgatgatgctgcgcccggtagggatggcctgtgagaacgatatgctggaggccaccggcggggtgaatacccatcgcggggcgatcttcgcttttggcctgctcagcgcggcggcgggcaggctggtgtcgaaaggtgagccgatagagcagcaccggctttgcgaccaggtggcgcgcttctgtcgcggcatggttatgcaggagttgtcttctgctggcggggaacggctcagtaaaggcgaggctcattttctacgctatggtctctccggggcccgcggcgaggcggagagcggtttcctgacggtgcgtacccaggccatgccagtctttacccgcatgatggaagagaccggcgacagtaatctggcgctactgcaaaccctgctgcatctgatggcgtggaatgatgacaccaacctggtctcgcgcggcgggcttgccgggctgaactttgtccagcaggaggcgcagcgactgctgtggcagggcggcgtgctggcggacggcgggctggaggcgctgcgacagtttgacgatgagctgattgcccgccatctcagccctggcggcagcgccgatctgttggcggtgacctggtttttatccgcgtttcccgccggcgcgcttttcccgctgtaacccactgcaaaaccgccttcgcccgcactgtacgggcgaaggcaccatcattagccttcccggttgtcatccggtaaacacggaatcgcggcacaatcgtatagtttttactgatatcgtccgccgtttgtcataaatttctaattatcggcgtttttgagtagcggcccgctgacgggctggttactctgaaaacaatttacgtaatgttaacaaaagagaatagctatgcatgatgcacaaatccgcgtggccatcgccggcgcgggcggccggatgggacgccagttaattcaggctgcattgcagatggaaggcgtggcgctgggcgcggcgctggagcgcgaagggtcaagcctggtgggcagcgacgccggcgagctggcgggcgccggcaaagcgggcgtcgcggtgcagagcagcctggcggcggtaaaagatgatttcgacgtgttgatcgattttacccgcccggaaggcacgctgaaccatctggcgttttgccgcgagcacggcaaagggatggtcatcggcaccaccggttttgacgacgctggcaaacaggcgattcgcgatgccgcgcaggacattgccattgtcttcgccgctaactttagcgttggcgtcaacgtcctgttgaagctgctggagaaggcggcaaaggtgatgggcgactataccgacatcgaaattatcgaagcgcaccaccggcataaagtggatgcgccgtcaggcaccgcgctggcgatgggcgaagcgatcgccggggcattgaacaaagatctcaaggactgcgcggtctacagtcgtgaaggctacactggcgaacgcgtcccgggcaccatcggcttcgcgaccgttcgcgcgggggatatcgtcggggagcatacggcaatgtttgctgacatcggtgagcgtattgaaatcacccataaagcgtccagccgcatgacctttgcaaatggcgctgttcgttcagcattgtggctgaaaggcaagaaaaatggcctgtttgatatgcgtgatgtgctggatctgaatagtttataacgattattacccatcgtgatgtggttattgctatcaataagttattgatgcagagggcaatattttgttgcccttttttatttttgcgaattatggcgtatgttttaagtgtaatgcgtaaaaaatacaatattagcgtgttttttagtgaatgaaatgtaaattttgaccatttggtccacttttttgccgagcatcgctctgttttacactcttccacatccgcaagcgttttctcagccaggtttattgatctttttggcgtaaaaatcacgggttacgcaccagtggcgtaaaatgacattaaaaatctccgctttaagttgacttttatccgacatctctccagaatgccgccgtttgccaaaaatctgcgggcaacagatttgcattgattcagatcgtgtttatgaattaatatgcaaataaagtgagtggatattctctggaggatgttttgattaagtcagcgctattggttctggaagacggaacccagtttcacggtcgggccatcggggcaaccggcacggcggttggggaagtcgttttcaatacttcaatgaccggttatcaagaaatcctcactgatccttcctattcccgccaaatcgtcactcttacttatcctcatattggtaatgtcggcaccaacgccgccgatgaagaatcttctcaggtacatgcgcagggtctggttattcgcgacctgccgctgattgccagcaacttccgcagtactgaagacctctcttcttatctgaagcgccataacatcgtggcgattgccgatatcgatacccgcaagctgacgcgtctgctgcgtgagaaaggggcgcagaacggctgcatcatcgcgggcgacagcccggatgcccagctggcgctggaaaaagcgaaagcgttcccgggcctgaacggcatggacttggcgaaggaagtgaccaccgcagaaacctatagctggacgcaaggtagctggaccctggcgggcgacctgccggaagcgaaagcggaaagcgagctgccgttccacgttgtggcatatgacttcggcgcgaaacgcaacatcctgcgaatgctggttgaccgcggctgccgcctgacggtggtgccggcgaaggcctccgccgcggacgtgctggcgctcaatccggacggtatcttcctctccaacggccctggcgacccggcgccgtgcgattacgctatcgaggcgattgaaaaattccttgagaccgatattccggtattcggcatctgccttggccatcagctactggcgctggcgagcggtgccaagaccattaagatgaagttcggccaccacggcggcaaccacccggtgaaagatattgataacaacgtggtgatgatcactgcccagaaccacggtttcgccgtagatgaggcgacgctgccggccaacctgcgcgtgacccataagtcgctgttcgatggcaccctgcaggggatccatcgtaccgacaaaccggcgttcagcttccaggggcaccctgaagcgagcccggggccgcacgatgccgcgccgctgttcgaccactttatcgagttaattgagctctaccgtcagtccgcgaaataatcaggagtaaaagagcaatgccaaaacgtacagacataaaaagtatcctgattctgggcgcgggcccgattgttatcggtcaggcgtgtgagtttgactactccggcgcccaggcctgtaaagcgctgcgcgaagagggctaccgcgttatcctggtgaactctaacccggcgaccatcatgaccgacccggaaatggccgatgccacctacatcgagccgattcactgggaagtggtgcgtaaaatcatcgaaaaagagcgcccggatgcggtgctgccgaccatgggcggccagacggcgctgaactgcgcgctcgagctggagcgtcagggggtcctggctgaattcggcgtgaccatgattggcgccaccgccgatgcgattgataaagccgaagaccgtcgccgtttcgatatcgcaatgaaaaaaatcggcctcgacaccgcgcgctctggtatcgcccacacgatggaagaggcgctggcggttgccgccgacgttggtttcccgtgcatcatccgtccgtccttcaccatgggcggcaccggcggcggtatcgcctataaccgcgaagagttcgaagaaatttgtgaacgcggcctggatctctctccgaccaacgaactgctgatcgatgaatcgctgatcggctggaaagagtacgagatggaagtggtgcgcgataagaacgataactgcatcatcgtctgctccatcgaaaacttcgacgccatggggatccacaccggtgactccatcaccgttgccccggcgcagaccctgaccgacaaagagtaccagatcatgcgtaacgcctcgatggcggtgctgcgtgaaatcggcgtcgaaaccggcggctctaacgtgcagttcgcggtcaacccgaaaaacggtcgcctgatcgttatcgaaatgaacccgcgcgtctcccgctcctcggcgctggcctctaaggccaccggcttcccgattgctaaagtggcagccaagctggcggtaggttatacccttgacgagctgatgaacgacatcaccggcggccgcaccccggcttcctttgaaccgtccattgactacgtggtcactaaaatcccacgctttaacttcgaaaaattcgccggcgccaacgaccgtctgaccacccagatgaagtctgtcggcgaagtgatggcgattggccgtacccagcaggaatccttgcagaaagcgctgcgcggtctggaagtgggcgctaccggcttcgacccgaaagtgagcctcgacgacccggaagcgctgaccaaaatccgccgcgagctgaaagatgccggcgctgagcgtatctggtatatcgctgacgcgttccgcgcgggcctctcggttgacggcgtcttcaacctgaccaacatcgaccgctggttcctggtacagattgaagagctggtccgtctggaagagaaagtggcggaagtgggcatcaacggcctcgacgctgacttcctgcgcaccctgaagcgtaaaggctttgccgatgcgcgtctggcgaagctggcgggcgtgcgggaagcggaaatccgcaagctgcgcgaccagtatgacctgcacccggtctacaagcgcgtggacacctgcgctgcggaatttgctaccgataccgcctacatgtactccacttatgaagaagagtgtgagtccaacccgtccgttgaccgcgataaaatcatggtcctcggcggcggcccgaaccgtatcggtcagggtatcgaattcgactactgctgcgtacacgcctcgctggcgctgcgcgaggacggttacgagaccatcatggtcaactgtaacccggaaaccgtctctaccgactacgacacctccgaccgtctgtattttgagccggtgaccctggaagacgtgctggaaatcgtgcgcatcgagaagccaaaaggcgttatcgtccagtacggcggccagaccccgctgaaactggctcgtgccctggaagctgccggcgtgccggttatcggtaccagtccggacgctatcgaccgggcggaagaccgtgagcgcttccagcacgcggttgaccgtctgaagctgaagcagccggcgaacgccaccgtcaccgccattgagcaggcggtagagaaagcgaaagagattggctacccgctggtggtgcgtccgtcttatgtgctcggcggccgggcgatggagatcgtctatgacgagcaggatctgcgccgctacttccagaccgcggtcagcgtctccaacgacgcgccggtgctgctggatcgcttcctcgacgatgcgattgaagtggatgtcgatgccatctgcgatggcgaaatggtgctgattggcggcatcatggagcatatcgagcaggcaggcgtccactccggcgactccgcctgttccctgccggcctacaccctgagcaaagagattcaggatgtaatgcgcgagcaggtgcagaagctggccttcgagctgcaggttcgcggcctgatgaacgtccagttcgcggtgaaagataacgaagtttatctgattgaggtcaacccgcgtgcggcgcgtaccgtaccgttcgtctccaaagccaccggcgtcccgctggcgaaagtggcggcgcgcgtgatggccggtaagactcttgcgcagcagggcgtgaccaaagagatcatcccgccgtactactcggtgaaagaggtggtcctgccgttcaataaattcccgggcgttgacccgctgttagggccagaaatgcgctccaccggggaagtgatgggcgtcggccgcacctttgccgaagcgttcgccaaagcgcagctgggcagcaactcgaccatgaagaaacagggtcgcgcgctgctctccgtccgcgaaggcgataaagagcgcgtggttgacctggcggcgaagctgctgaagtttggcttcgagctggatgcgactcacggtacggcgattgtgctgggtgaagcgggcattaacccgcgtctggtgaacaaggtgcatgaaggtcgtccgcacattcaggaccgcatcaagaatggcgaatatacctacatcatcaacaccaccgcaggtcgccaggcgattgaagactccaagctgattcgccgcagcgcgctgcagtacaaagtgcattacgacaccaccctgaacggcggctttgccaccgcgatggcgctgaacgctgacgccaccgagaaggtgatttcggttcaggaaatgcacgcgcaaatcactaaataagcttcccggcctggccggatagcaacaatcctgggctgacgacatcgtcagcctatttttttgggccgcagccatcttcagagagttctgcttttaaccccctgtcgggtcaggctaactatagttagcaccataacgatacctattgatgaaaagacaggaggatacaatgcggaacaatattctggtggcatccgcactggcagcgacggcaatcatgttcgtggccggctgctcatcgaatcagtcgatcaaaaccaccgacggcaagaccattgtcaccagcggcaaaccgcaggtggatgatgacaccggccttgtctcatacaaaaatgccgaaaccggccgcgtggagcagattaaccgcgaccaggtgaagtccatggacgagctggataactaaggcctgacgttaaccctcagggcgcgcgttgcgtaagccatcgcgacataaatcacagttatcattgtaagcggttcgcttaactgtctacactcttgctgattacgacaagagcaaacgcaggccaatcaatgattctgataatttatgcgcatccttatccgcagcattctcatgcgaataagcgaatgcttgaacaggcagggacgcttgaaggcgtagagatacgctccctctatcaactctatcccgactttaatatcgatgtcgccgccgagcaggcggcgctggcccgtgccgatctggttatctggcagcatcctatgcagtggtatagcgtaccgccgctgctcaagctgtggatggacaaggtgctgtcgcacggctgggcctatggtcacaacggtattgccctgcgcggtaaatcgctgatgtgggcggtcactaccggcggcggtgaaagccactttgatatcggttcgtttcccggtttcccggtgctggcgcagcctctgcaggcaactgcgctttactgcgggatgaaatggctgccgccgttcgctatgcactgcacctttatctgcgatgatgaaacgctgcaggcgcaggcccgccgctatcgtcaacgcttaatcgactggcaggaggcacaccagaatggatagccatacgctgatacaggcgttgatttacctcggcgccgcggcgctgattgtgcccatcgccgtccgtctggggctggggtcagtgctgggctatctcatcgccggctgtattatcggcccgtgggcgctgcggctggtgaccgatgccgaggcgattctgcactttgccgagattggcgtggtgctgatgttgttcgtcattggtctggagctcgatccgcagcgcttatggaagctgcgcgcctcggtgtttggcggcggcgcactgcagatggtggcctgcggggtgttgatcggcctgttctgcatgctgctgggcctgcgctggcaggtggccgagctgattggtatgactctggcgctttcttccacagccattgctatgcaggcgatgaatgagcgcaatctgacggtgtcgcagatggggcggagcgccttcgcggtgctgctgttccaggatatcgccgcgatcccgctggtggcgatgatcccgctgctggcggccagcggcggcgccacctcgctgatggcttttgccctctccgcgctgaaagtggccgcagcgctggcgctggtggtggtccttgggcgctatctgacccggccgctgctgcgctttgtcgcccgttccggcctgcgcgaagtgttcagcgccgtggccctgttcctggtcttcggctttggcttattgctggaagaggtggggctgtcgatggcgatgggggcgtttctcgccggggtgctgctggccagctccgaatatcgtcatgcgctggagagtgatattgagccgtttaaaggactgctgttggggctgttctttatcggcgtcggcatgtcgattgatttcggcaccctggtcacccatccgctgcgtattgtgattttgctggtcggtttcctggcgataaaaatgctgatgctgtggcttatcgccaggccgcttggcgtaccgcgcgcccagcgccgctggtttgcggtgctgctggggcaggggagtgagttcgcgtttgtggtgtttggcgccgcgcggatggcggatgtactggacggcgaatgggcaaaagcgttgaccctggcggtggccctgtcgatggcggcaacccccattctgctggtgctgctgacccgtctggagaaatcgtccagcggccaggcgcgtgatgctgacgagattgatgaagagcagccgcgggtgattgtcgccggctttggccgcttcgggcagattgccgggcgattgctgctctcgagcggggtgaagatggtgatcctcgatcatgacccggaccatgtcgataccctgcgcaaatttgatatgaaggttttctacggcgatgccacccgggtcgatctgctggagtcggccggggccgaaaaggcggaagtgctgatcaatgccattgacgatccgcacgtcagcctggagctggtggcgagggtaaaagagcattttccgcatctgcagatcatctcccgcgcccgcgatgtcgatcattacattcagctgcgccaggctggcgtcgaggccccggagcgtgaaaccttcgaggcggcgctgaagtccggccgaatgacgctggaggcgctggggctcggcgcctatgaagcgcgcgagcgggccgatctgttccgtcgattcaacctgcagatggtcgaagagatggtggcgatggcggaaaacgatgccgcgtcgcgggtggcggtcttcaagcggaccagcgatatgctgaccggcatcatcaacgaagatcgtcatcatctgtcgctggtgcagcgtcatggctggcagggtacggaagagggcaggcacaccggggatattgccgatgagccggaaaataagccctcagcctgaggctgaccagtaacattttgttttcgtttggatcctcttctggcggcccacggtgtgaacgtgggcttgccagcaaatcagaaaactttcttattctttaccctccggccagttgacgaagttgtacgctttccgtatagtggcgacaattttttgcactcgggaatgaatgaatgatcagtctgattgcggcgttagcggtagatcgcgtcattggtatggaaaacgccatgccatggaacctgcctgccgatctcgcctggttcaaacgcaacacgttaaataagccggtggtgatggggcgtctgacctgggaatccattgggcgcccattgccggggcgtaaaaatatcgtgatcagcagcaaacccggcagcgacgatcgcgtgcagtgggtctcctccgtagaagaagcaattgccgcctgcggcgatgtggaagagattatggtgatcggcggcggccgggtgtatgagcagttcctgccgaaagcgcagaagctctacttgacccatattgatgcggaagtggaaggcgatacccatttcccggattacgatccggacgaatgggagtcggtgttcagcgagtttcatgacgccgacgcgcagaactcccatagctactgctttgagatcctcgaacgccgttaagcgggcaggatagcgataaaaaaaccccggtcgcgtctggcgtgaccggggttttcttttgcatgaattgcgcgacgatggcgcactcagtatctcgtcatgtttcccgtcgcgggcttcgtcttctttctgaagcgctccccggggcgacaaatagcacataaacgtaggtcgggtaaggcgttagccgccacccgacaaaacgacgccgcaggtagcccggataaggcgcaacgcgccgctatccgggaagagtcaggacgcgacggcttcgccttcgtcgaggcttttctgccggtttgacggctgggtgaagtactgcttatcttcccagcgcaggcaggtgagttccccgccccagcagcagccggtatccagggcgtaaatcccctccggcgtgccgcgtccctccagcgaagcccagtggccaaaggcaatgctgtaggcattgctgaccgggccgggaatggcaaaccacggcttcagcggcgccggggcgtcctcgggcgcttccttcgaatacatatccagctggccgttcgggaaacagtagcgcatgcgggtaaaggcgttagagataaagcgcaggcgcgccaggccgctcagctcgttgctccagtggttcggcatgtcgccgtacatggcatcgaggaagaaaggataggagtcgctggagagcactgcttcaacatcgcgcgcgcactgctgggcggtctccagatcccactgcggggtaatgccggcgtgggccatcaccagctttttctcttcatccacctgcagcagcggctggcgacgcagccagttgagcagctcatcggcatccggcgcttccagcagtggtttcagacgatccttcggcttgttgcggctgataccggcaaagaccgccagcaggtgtaagtcatggttgcccagcaccagtcgtacgctgtcgcccagagatttgacatagcgcaggacctccagcgatcccgggcctcgggccaccagatcgccggtcagccacagcgtatctctccgcggatcgaattcaacctgcgctaataatgcgatcagttcatcgtagcaaccgtgaacgtcgccaataaggtatgttgacattgttttaatgaatgagcgttggaactgcgagacggaaaacagggatctcaatacggaacggcgcgccgtcgatatcgatcatctcataatgaccctgcatggttcccagcggcgtttcaatcactgcgccgctggtatattgatattcaccgccggcgggaatatgcggttgctcgccgaccaccccttcaccctgaacttcagtctcacgaccgtggccgttagtgatgagccagtagcggccaagcagctgaacctgactccgccccaggttgcgaatggtgacggtgtaagcgaagacgtagcgctcttcttccggggaagactgcgattcgatatagacgctctgtacctggacacacacccggggcgaatgaatcatggttagctctccttcgttggcagattgtcagacagccagttggccatcaggcagtactgcgccacggaaatattttcggcgcgcatggccgggtcgatgcccagctcggtcagcacttccacgctgaacagattgccgagactgttgcggatagtcttgcggcgctggttgaacgcttcggtggtgatgcggctcagcacccggatctctttgaccggatacggcatggtgctgtgcggcaccaggcgtaccaccgcggagtcgaccttaggcggcggggtaaacgcgctcggcggcacttcgagtaccgggatcacctggcaataatattgcgccatcacgcttaaccgaccatacgccttactgttcggtccggcaaccagacgattcactacttccttctgcagcataaagtgcatatcggcaatggcatcagtatagctgaacagatggaacatcagcggggtcgagatattgtacggcaggttgccgaagacgcgcagcggctggcccattttctccgccagttcgccaaagttcatggtcatcgcatcctgctgatagatggtcagctttggaccgaggaacggatgcgtctgcaggcgagccgccagatcgcggtccagttcgatgacggtcagctggtcaaggcgttcgccgaccggctcggtcagggccgccaggccggggccgatttcaaccatcgcctggcctttctgcgggttaatcgccgagacgatgctgtcgatcacaaactgatcgttgaggaagttctgcccgaagcgtttacgggctaaatggccctgatggactcgattattcattgggtattaacaatcattttgatggcgagattaagcgccgtgataaaactgccgacgtccgcttttccctggcccgctaattccagtgcggtgccgtggtcgacggaggtacgaataaaaggtaaaccgagcgtaatgttcacgccgcggccaaagccctggtattttagcacgggcaggccctgatcgtggtacatcgcgagtaccgcatcggcatgatcaagatatttcggctgaaagagggtgtctgccggcagcggaccgctgaggttcatcccctttgcgcgcatctcttccagcaccggaatgatggtgtctatctcttctgttcccatatggccgccttcgccagcgtgcgggttaagcccgcaaaccagcacatgcggctgggcaatgccaaatttcgtgcgcaggtcgtgatcgagaatggtgatgatctcgcgcagtagctcgggggtaatcgcttcgctgatggctttcaacggcagatgggtggtgaccagcgccacccgcagctcctcggtcgccaacatcatcaccactttgctggccttcgcgcgctcttcaaagaactcggtatgaccggtaaaggcgataccggcgtcgttgatgttgcctttatgcaccgggccggtcactaacgccgcaaactcgccgctaaggcagccgtcgcaggcgcgcgccagcgtctccactacgtaggcgccgttttgcacattcagcacgccgggctccgccgggacgtttagcggcacgttcagcagcgtcagggtaccggcgcgctgaggaacaggaggttgcgcgggatcgtaagggaggagagataaaggaagaccgagccgcttggctcggtcagttaacagggcgccatcggcgcaaatcaccagctcaactggccagtcgcgctgggcaagctgcacgaccaggtcagggccaatcccggcgggttcgccgggagtgataacaactttacgggtttcaggcatcgatattagttgctcagaattttaacatacgcactggcgcgctgttcctgcatccaggttgccgcttcttcagagaatttgcggttcatcagcatgcggtaagcacgatctttctgcgcggcgtcggttctgtcgacctgacggctatccagcagttcgatcagatgccagccaaaggaagagtgcaccggtccgctggtctgccctttgttcagacgcatcagcgcatcgcggaacgccgggtcaaagatgtccggcgtggcccagcctaaatcaccgccctggtttgccgagcccggatcttccgaataggttttcgccgcttgagcaaacgtgattttcccgctcttaatctcggctgcgatctgttccagcttagcctgagcctgggcgtcgttcatgatcggcgacggtttcagcagaatatgacgggcgtgaacctcggtaacggagatattctgggtaccaccgcgcaggtcgttgactttcagaatgtggaaaccaacgccggaacgaatcggaccgacgatatcccctttcttcgccgtgcttaacgcctgagcgaaaatgcccggcagctcctggatacggccccagcccatctggccacccttcagcgcctgttggtcagcggagtaggtgatcgccagtttgccgaagttggcgccgttgcgcgcctgctcaacgatggagtttgcttgctcctgggccgcggcgacttcatcagaggtcgggttctccggcagcgggatcaggatgtggctcaggttgagctcggtgctggcgtcgttctggtcgccgatctgtttcgccagcgcttccacttcctgcggcagcacggtgatgcgacgacgcacttcattgttacgcacttccgaaatcagcatctctttacggatctggttacggtaggtgttgtagttgatgccttcataggccagacggctgcgcatctgatccaaggtcatattattttgtttggcgatgttggcgatagcctgatcgagctggtcgtcagagatcttcacgcccatcttctgccccatctgtaacacgatctggtccatgatcagtctttcgaggatttgatggcgcagggtggcgtcatccggcagctgttggccagcctgaccagcattgagcttaaccgattgcatcaaaccatcgacgtcgctttccagcacgacgccattattgacgacggccgctactttatcgaccacctggggggcagcgaaactggtattcgcgatcatggcgataccgagaagcagcgttttccagttcttcatactttttccatttcgattaaccgcaaatgcggatgatgttgtaaaccagccgcatcacagggagctctggtacggtaaaatgttcgagcgcagcatctgctgggtgccgaggccgtagttagagctcagaccgcgcaattcgatattgattccgaaggtgttatcgtatttgctctcgccgccgttgtcgttgctgttccagccgttgactttacgttcgtagccaagacggatggcgtagcagcaggagttatactgcacacccaacatctggtttgctgctttccgggtattagtatcgtagtagtaggccccgaccacggaccagcgatcgacaatcggccaactggcggtcatccccacctgcgaaataccctgtttatattgtgccgcggtggaatatgacggcagcgtggcctgaatatattccgggctggcgtaacgatagttaagctgaactaagcggttctcatcgcgacggtattcaatggtgccgttaccagtggcaacgttatccagacgcgtatcgtactggatccctccgcgcagaccccattcatcggcaatgcgccagtaggtatcgccggcccagaccagtgaacccgtggtatcgttgttctcccagttgatgttgtcatcaccggtgcgtgactcggtgaaatagtagatttgaccaacggaaatattaaaacgttccaccgcggcggcatcatacacgcgcgaggtgagcccggtggtgacctgattagccgacgcgatgcggtccagaccgctataggtacggtcgcggaacagaccggtgtaatccgactgcaacagcgtggagtcgtagttgccgatttcactctgatcgcggtacggcacgtacagatactgcacgcgcggttccagcgtttgggtgaatccctcctgcaggtcgcgttcaaagaccattttgccgtcgactttaaactgcggcattacgcggctgacggactctttatagtcagtgccgttggcggcattgtacttatcgaggttgctctgctggtagtgagtcgccagcagcttggcttcggtattcagactgccccaaccgttggacagcggcaggttgatcgtcggttcgaagtgaacgcgggtcgcttccggcatgttgttattcgagttaacaaaatgggcaacctgtccatagagatgggtatcgaacggaccgacatcattctggtagtagttgacgtcgagctgcggctcagccgaataggagttgctcgattcgcggtcaaagacctggaactgtttggtcgataccgtggcgtcaaagttctggttgacgtaaccggcgctgaatttctgcgtcgcatagccatcggtactggaaccatatttcgagctgaagtcgttgaagtagtcaggatcgctgaccttggtgtagtcagcgttcagacgccatacctgatcgataacccctgagtggttccagtagaacagccagcggcggctgttgctgtcgctcgagtggtcgtcttcgtagactttatccgacggcaggtagtcgaattcagttaagccgctgccgagctgggtcagatagcggaactcgttttcccacatcacgccgccgcgtttgttcatatagtgcggagtaatggtggcatcgaagtttggcgcgatgttccagtagtacggcagggagaattccacgccgtttttggtgctgtatttcgcgttcgggatcaggaagcctgaacgacgcttatcgcccaccggcagctgcaggtaggggctatagaaaatcggcacagagccaagcttgaagcgggcgttccagatctcggcaacctgctcttcgcgatcgtggataacttcgctgccgacgacgctccaggtgtcggagcccggcagacaggaggtaaagctgccgttttcgagaatggtatagcggttttcaccgcgctgtttcatcaggtcggcggtgccgcgtccctggcgtccgaccatttgataatcgccctgccagacgttggtatctttggtattcagattcgaccaggcttttggccctttgaggatcacctggttatcgtcgtaatgcacgttgcccagcgcgtccaccgtgcgcaccggctgcgcctggcccgcggcctgctgctggtgcagctgaacttcgtcggcgcggaggcgactattcccctggttaatatcgacgttgccggtaaagacggcgttgtccgggtagttgcccttcgcatgatcggcgttaatcgtcaccggcagatcgccaggacgaccttccacgagcggacgatcatagcttggcacgccaagcatacattgcgttgcgagatcggcagcgaggccttgttggctatacaaggcgctggcaatcatcgtagccaggaggctgggaatacgttttttcatacgttgtatttattgttccatcatcttgtgacagcggcttgcaaacggtcagagcctaacttactcaacattatcacgctagtgttaatcctgcccgtttcgagcccgagcgttaggcaccctgttgaatgacgagtatgataaagcaaattataggctatgtcccacaattgaccgaggcgcgagtgccgggtaacgtgcggtcatattcgagcttaacggcgataaacagttggggagtctatgcagtatttgggtaaagtgattggcgtggcagtggctttgctgatgggtggtgggttctggggcgtggtgcttggctttctggtcggccatatgtttgaccgggcgcgcagccgccggttaaatctcttcgccaatcagcaggagcgtcagtcgctcttcttttccaccaccttcgaagtgatggggcacctgaccaaatccaagggccgcgttaccgaagcggatattcatgtcgccaatgtgctaatggatcgcatgaacctgcatggcgcctcgcgcaccgcggcgcagcaggcgtttcgcgacggtaaggccgacaactatcccctgcgcgagaaaatgcgtcagctgcgcagcgtctgctttggccgtttcgatctgattcggatgtttctggaaattcagctgcaggcggcgttcgctgatggcgaactgcatcctaacgaacgggaagtgctgttcgtcattgccgacgagctcggcatctcccgcgcccagttcgatcaattcctgcggatgatgcagggcggcgcccagtttggcggcggttcgcagcagcgctcttatggccagcatggcggcaacgccggctggcagcaggcgcagcgtgggccgaccctcgaagatgcctgcaatgtgctgggagtaaaaccgaccgacgacgcggcgacggtgaagcgcgcctatcgcaagctgatgaacgaacatcatccggacaagctggtagcgaaaggtctgccgccggagatgatggagatggccaaacagaaggcccaggagatccagaaggcctgggagctgatcaaagagcagcgcggcttctgacgtttccagcccctcccgtccggcgaggggttttaacttttgaccttagcgcggcgatacagccgccgcggatggccaatttttccgtacagcatctccacttccagaaaaccggtctcaacgccgtgctccagatagcgacgggcggtggttttgctgagcccggcggcgctgaccacttcatcaacggaaaaacagtgcgcttcccggtcgctaaacagtccctgcaccagcgccagcgttttctcttcaatccccttgctgccgctatccacgcgatagttcttcgcctgcagttgatagagggaatcgacgttttgctgatcgacgattttccactctcgttgctgatcgtagaactggataaagcgctccagcgactggctcagccgcttccatgataccggcttaaggatatagtcgaaggcgccgttgcggatggcctggctgcaggtttccatatcgctggcggcggtgataaagatcaccgagcattggctggtcgccagcgccgggtcggtcatcagcgtgacgcctttgccgtccggtaaatagttatccagcagcaccagctgcggcggcgtggcgtgaagcagctgccgcgcctgggcgagggaggccgccatgcctgccagccgcagtcgcgggtgtttttgcacaagctcggcgtgcaggcgcgccagttcgctctcatcttcaatgattagcacatcgaccaggtcatgatgcatcgtgggcctccggttgcggacaggcgtgcgcgtcggccgggataaatagggtgaagatcgttccccgcggcgcgttatcggcgacttcgatggtgccgcccgcctgagtgacataatgttcaataagatacagaccaatgccgtgatcgccacgggttttggtggtgacgccgcgttcaaaaatgcgctcgcggatatcggggcggatgccgacgccgcggtcggccacttcgataatcaactcccgggcgttgagctggatcaggacttcaaccggctcatgcggcagctcggcacgctgcgtggcttcgatggcgttatccagcaggttgccgatgatggagatcagctcggattccattagtgacggcagggggcggtcgatgcggcaggccgggtcgaagctcagcgccacgcctttttcgcgggcgcgggtggctttgccgagcagcagaccgcatagcgtcggcgagtggaagtgcgaggagataaaatccagtagctcctgagcatgttccgactgggcctgaatatagcggatcgcttcgtcataatggcccatatgcagcaggccggagagggtagtcatccggttgagctgctcgtggcgcatgatgcgcagattgtcgacatagcgcttcacctggctcagctgggcggtgagggcattgatttcattgcggtcacggaatgtgatcacccagccctgcagggtattctccagcataatgcgcacccgactggcgagcacggtcaactggttgaagcggcatagctcatcgtgggtatcgcgttcgagcatgtcgccgctggcgaaaaagggctgcggcgaaatgacgctgtcgatcgactgaccgcgcagctggcgggcgggctggctgagccccagcaggctgcgggcggcatggtttatcacctcaatacgccgctggcgatcgatgacgatcaccccctcaaagatcgactccatcatcgccttttgctggcgaaccagcaggccaatttcccgcggctcgagcgaaaaaatctgcttcttgatactgcgggtaaagtaccaggagaagataaacagggcgatgagcagcaggacggcggcgataaaaatattgatcactttagtcagagtaatgctgtcgagatagctggtgaggtagccgacggagacaataccgatcactcgccctgcgtcatcaacgatgggcgttttgctgcgcagcgagaccccgaggccgcctttgcgaatggtggtgatggatttcccttccagtaccgcctggttgtcgccgccgaccagtcgggtgccaacccactccggatggacggaatgaaacagatgaactccctgacggtcgccgatgacgataaagctggcgtcgctatgggcggcgatttgctgcataaacgcctgaatcgcctgtgggtcgtgccggctgacctgttgacgtaaattcggcatcagggctatctcttcggcctgtattttggcccgggcgctcatctcctgataaagctggcggctggcgtcaaaataataataaatgcccagcgcgataaaaaggaccgagaaaaaagcgaccagagaaataaacagcttatattgaaaagataatttcataggccccggacgacgtattaaccatagcggcactctatcatttttctgtcacgtgacgtaaatgttaagggaaagttgtgatcagcggcgcaggcgcgggctgccgccagcggtcgcggcggaaataggcggccggcgggaaataaaaaccataaaaaccacagtcataaatcagagatatatcactcccgggcagttcagcgaataaaaaccataaaaaccatagtgaccattaaaacttcttttttaatctgggaagcttcacattaacgacgccgctgtccctttacgctgaaaatgaataataacgacagggctgaatttatgagcaccacagacaatgcattctctgcaacccttgaaccgatcgatacgccgaaaaccacgctcaagcagcgctggtggcatattatggataactggaaggtggggatcgtcccgctgccgctgtttctgctggccggaggactgattgccctcgactgccttggcggcaaactgccgagcgatatcgtggtgatggtggccaccctggctttctttggcttcgcctgcggcgagtttggtaaacgcctcccggtgctggggaaactcggtgcggcggcgatctgcgccacctttattccttccgcgctggtccactatggtctgctgcctgacgtggttattgaatccacgaccaaattctataaatccactaacatcctctatctctatatctgctgcatcattgtcggcagcatcatgagtatgaaccgcaccacgctgattcagggctttctgaagatcttcttcccgatgctgtgcggcgaagtggtcggcatgctggtgggcatcggcgtcggcacgctgctgggcatggagccgttccaggtattcttctttatcgtgctgccgattatggccggcggcgtgggagagggggcgattccgctgtcaatgggttatgccgcgctgatgcatatggagcagggcgtggccctgggccgggtattgccgatggtgatgcttggcagcctgacggcgatcgtcatctccggctgcctcaaccagctcggcaagcgcttcccgcatctgaccggcgaagggcaactgatgccgaaccgcagccatgaaacccgcagcctcagcgagagcgaaggcgtgagcggtaagaccgacgttgggaccctcgcctccggcgcgctgctggcggtactgctgtatatgatggggatgctcggccacaaactgattggtctgccggcgccggtaggcatgctgttcctcgcggtgctgttaaagctggctaacgtggtgtctccgcgtctgcaggaggggtcgcagatggtgtataaattcttccgcaccgcggtcacctacccgatcctctttgccgtcggcgtggcgatcaccccgtggcaggaactggtaaacgccttcactttaaccaacctgctggtgatcgtcagtaccgtctccgcgctggtggcgaccggtttcctggttggtaaaaagatagggatgcacccgatcgatgtggcgattgtttcctgttgccagagcgggcagggcggcaccggcgatgtggcgatcctgaccgccggcaaccgcatgagcctgatgccgttcgcgcagatcgctacccgcatcggcggggcgataaatgtctcgctggggttgctgttcctcagccactatctggcgtgatataacgctacgctcagcgataaatctgctattttccgctacagaacgccgaaaatatctgcgttctgtatcctaaatgctccgcatttagcgttacaatcagcgcgcgatcggctatcgcaaccatcatcatgacagtccaggcgctgtcgtatttatcatatgtaggagaggaattaatgtcagtggatactcccgcccaggcgggcgtcagcatcgacgcattgctggcggcgaaagagcagcgtgcagcccgccaggccgactggttggcccattatcagcagcctgttatttccctgaccctggtgaccccgggggcggtgaaggacagcattcgctatcgcaatatgatgggcgttgccctccaggcctgcgatcagctgctgtggaagcaccgctggcaaacgctggatcgtcaggtgctatggctgccgaccgggccagaagcgctgtggtgcgtagcgcatccggccagcgaaatcaaagcgatgtgcagtacgctggagcagagccatccgctgggacgcctgtgggatatcgatgtaatctgtccgcagaacgggctggtgggacgccagtcgctgggcgaatcgcagcgccgctgcctgctgtgcgatgagccggcgcacgcctgtgcgcgcagccgtcgtcacgacaccgatctcgtcgtcgcccgcgttgagcagatgattgacgcgtggttcgcccgcgattaatcgggattgttttctgtatcctcactaatccgagttgcacgcagccaacccgcatgcaactcgaagtatgagcgttaaaagtcgatcggcgcgcgaaaggtcatcgcgttgccgtaggcaggatgggtgatggtgagcgtctcggcgtgcagcagcaggcgcggggccatcgccagcgcctccggcgtggcatagaagcggtcgccaaggatcggatgccccagcgccagcatatgcacgcgcagctggtgcgaccgtccggtaatcggcttcaggcgcacgcgggcggtgttatcttctgcgtactccagcacctcatattcggtttgcgccgctttgccggtttcatagcacaccttctgctttggccggttcggccagtcgcaaatcagcggtaaatccacgaggccttccgccggctgcggatggccccagacgcgggcgacgtactgcttcttcggctcgcgctcgcggaactgacgcttcagttcacgctcggcggctttattcagcgccaccacaatcacgccgctggtggccatatccaggcgatgcaccgattcggcctgcgggaagtcgcgctgaatgcgcgtcatcacgctgtctttatgctcctcaagacgaccggggacggacaacaagccgctcggcttgttgaccaccatgatgtgctcatcctgatacaggatcaccagccagggatcctgcggcggattgtagttttccatcgccatgttcgcgttccgttactggtgagtgacgacgatcagacgcagcgcgtccagacgccatccggcctgcgccagcgcatccatcacctgctgacggttgctttcgatccccgccagttcgtcgtcacggatgttcgggttcaccgccttcagcgcttccagacgcgacagctccgccgtcagcttttcatcggcttcgttacgcgccgcgtcgatcagcccctgcgccgctttggcgatctgcgcttcaccctgctgcagaatcgcgtgaacgtcctgctgcaccgcgttgaccagcttgctaccggtatggcggttgaccgcgctcagctggcggttgaagctttcgaactccacctgcgcggcgaggttgttgccgtttttatccagcagcatgcgaaccggggtcgccggcaggaagcggttgagctgcaactgcttcggcgcctgcgcttcgacgacatagatcagctccagcagcagggtgccgaccggcagcgccttgttcttcagcagggaaatggtgctgctgccggtatcgccggaaaggatcaggtccagaccgttgcgtatcagcgggtgttcccaggtaataaattgcgcatcttcacgcgacagcgccacgtcacgttcgaaggtgatggtgcaaccgtcttccggcaggcccgggaaatccggcaccagcatatggtcggaaggggtgaggacgatcaggttttcaccgcggtcgtcctggttgatgccgacgatatcgaacaggttcatcgagaaagcgatcaggctggtgtcgtcatcctgctcttcgatgctctccgccagggcctgggctttctcgccgccgttggagtggatctccagcagacggtcgcggccctgctccagctgcgccttcagggcatcatgctgttggcggcaggatttgatcagatcgtcaaagccgtcgatggattccggcgccgcaagatagttgatcagttcatcgtgcacgctgtcgtagacggtgcgaccggtcgggcaggtatgttcgaaggcgtcgagcccttcgtgataccagcgcaccagcaccgactgcgcggttttttccaggtacggaacgtggatctggatatcgtgcgcctggccgatacggtcgagacgaccgatacgctgctccagcagatccgggttaaacggcaggtcgaacatcaccaggttgctggcgaactggaagttgcgtccttcggagccgatctcggagcacagcagcacctgggcgccggtgtcttcttcagcaaaccacgccgcggcgcggtcgcgttcgataatcgacatcccttcatggaacaccgcggcgcggatgccttcgcgctcgcgcagcacctgctccagctgcagggcggtggcggccttagcgcagattaccagcaccttctgcgagcgatggctggtcaggtagcccatcagccactcgacgcgcgggtcgaagttccaccaggtaccggtatcaccttcaaattcctgatagatctgctccggatagagcatgtcgcgcgcgcgctcttccgcggttttgcgcgcgcccataatgccggacactttgatggccgtctggtactgggtcggcagcggcagacgaatggtgtgcagctcgcgtttcgggaaacctttgacgccgttacgggtattacggaacagcacgcggctggtgccgtggcggtccatcagcatcgagatcagctcctggcgcgcggcctgggcatcttcgcgatcgctgttggcggcctgcagcagcggctcgatatcctgctcgccgatcagatcgcccagggtattgagttcgctatcgctcagcttgttgcccgccagcagcagcgcgacggcgtcggccaccggacggtagttctgctgttcttcgacaaactgttcaaaatcgtggaagcggttcggatccaacagacgcaggcgcgcaaaatggctctccattcccagctgttccggcgtcgcggtcagcagcaggatacccggcacgcgctcagccagctgttcaatagcctgatattcacggctcggcgcctcttcgctccacaccaggtggtgcgcttcgtcgaccaccatcaggtcccactcggcgtcgcacaggtgctccaggcgctgcttgctgcgacgcacgaagtctaaagagcagatcaccagctgttcggtttcgaacggattgtaggcatcgtgctgcgcttcggcgtagcgctcgtcgtcgaacagcgagaaacgcaggttgaaacggcgcagcatctccaccagccactggtgctggagggtttccgggaccacgatcagcacgcgctcggcggcgccggagagcagctgctggtgcaggatcatcccggcttcaatggtcttacctaagcccacttcatcggccagcaggacgcgcggcgcgtgacgacggcccacatcgtgggcaatatgcagctggtgcgggatcaggctggtgcgctggccgcgcaggccgctccacggcatgcggtactgttcgctctggaacttgcgcgcgcggtagcgcagggcaaagcgatccatgcggtcgatttggccggcgaacaggcggtcctgcggtttgctgaatactagtttgctgtcgagcagcacttcacgcagggtgacgttcgcttcctgggtgtccaggcgggtgccagtgtaggacagcagcccgttctcttcattcactttgtcaacgtggagctgccagccttcatggctggtgatggtgtcgcccgggttaaacattacgcgggtgatcggggaatcgttgcgagagtacagacggttttcgccgatggcggggaaaaggagagtgaccatgcgcgcatccagcgctaccaccgtccctaatcctagttcgctctctgtgtcgctaatccagcgttgaccaagtgtaaaaggcatatatgttcggctctttagttctttaattgcaggcaatagttgatcatctccatgaacaatcggagatgcgtcaaaattggggccaggaatggaaagggcgctatattactggatggcagaacgttcgtcacgttctcctcacgcttcatttttaggctttcgtgcccgtggaatgggtgacaaaaaatcaaaatagccccaactgtcctgtcactattgtagcaaagtcatcgttgacgaagggcaggatcccttccgccaccggctgcaactgctttgttaaatagtgatcgtaatcgagcggcgactgctggtaatccaccggctccgggccgctggtggtccagacgtatttgatggtgccgcgctgctgatactgctgcgcccgcccaagcttcaggttgtgttcatcggcaagccgggcggcgcgcacgtgcggcggtacgttgcgctgatactccgccagcggccggcgcaggcgtttgcgataaaccagctgttcgtcgagctcgccgttcatcagcctggcgatagtctcccgcacataatcctgatacggctggttgcggaagatgcgcaggtataactcctgttgaaactgctgggccagcggcgtccagtcggtacgcaccgtttccagacccttaaacaccatgcgctgggcatcgccctcctgaatcatcccggcatagcgcttcttgctgccggtatcggcgccgcggatcgtcggcattaaaaagcggcagaagtgggtttcatactccagctccagggcgctggtaagctggcttttgctaagctcctgcgcccaccaggcgttgacatggctgaccagctcgcggccgatctccgccgcctgggcttcgctgtgcgggcgcttcagccagacgaaggtggagtcggtatcgccgtagataacgtcatagcctttggcttcaattaacgctttggtctggcgcatgatcgcatggccgcgcatggtgatcgacgaggcgagacgcgggtcgaagaagcggcaggcgctggtccccagcacgccgtaaaaggcgttcataatgatcttcagcgcctgagagagcggcttattgtgctggcgtttggcttcatcccggccgtgccagatctggctgacaatccccggcaggcagtgcttatctcgcgagaagcgggcgccgaggaagccctcgatactgtgctggtcatcgggttgcgccagcccttcaatcaggccgaccggatcgattaaaaaggtacgaataatcgacggatacaggcttttatagtccagcaccagcaccgagtcatacaggccggggcgggagtccataacgtagccgccggggctcgcctgcggcggtacgtcgccgagattcggcgccacgtagcccaggcggtgcatgcgcgggaaatagagatggctgaaggcggcgaccgagccgccgtggcggtcggcgggcagaccgttgaccgtcgcccgttcgagcaaaaacggcatgatctccgttttgtggaagatccgcgtcaccagctcgcaatcctgcaggttatagatggccagcgccggtttgtcttcatgaaagcggcgatcgatctcatccatccgatcccatgggttgtcgatggctttgccttctcccagcagctcgcgggccaccgcctccagcgaaaaggaggagaaattccagaacgccgattttagcgcgtcgatgccgtcgataatcagccgcccgttggcctgggcgaaaaagacgccgttcttaaagccgtgctcacgccactccagctcgctgttgccgcggccgagccgcagcgggatgcgatagcgttcggcgtgcttttgcagaacgcgcagatcgaactgcactacgttccagccgatcagcacgtcggggtcgtgttcggcaaaccaggcgttgagcttttccagcagcaggggacggctggcgatgaagaccagctcgaagtcgacgtctggcggcgtttccggttcggggcccagcatgtagaccacccgctggccgcagccttccagaccgatgcagtacagctcgccgtggcggctggtttcgatatccagcgacacccatttcagtggcggacgatagtcagggttcggcttcatgcgtgcgttgaccagctgcgagccgcgcgtttcgccttccacccacaccggggcggtgataaagcgctccatcagatagcgctccggcgggcggatatcgccttcgtaaacggtgacgccgctgtcgcggagcatcttctccagacgcatcaactggcgatgggcgcggcagtagaggccaacaatcggctgacggtggaaatctttcagggccagcggggcgaagcggagccctttctccccctgcagcagccgttcagcctgcgcccgctgcgcttcgggaataaaggcgacggactcctgcggcgggagggtgacctgcagcggaccgtcgtcggtggccagccagaaggagagctcggtgccctgcggagtgtcccgccagtgacgggtgagtaaaaatcctgctcgtggctgggtcacgggtattctcgccgataaaaaaccaggcctgattatagcctggtttcatgaagggtgctggggttttatacaggtgttcggcgctaatgttgccccggattgcggcttgtgccttatccaggctaccagatggcgcagagccctggccctgctaagcgcagcgcgagcagggtgattattggccgtagtaggctttggccccgtgcttacgcagatagtgcttatccagcagggtttgctgcatagccggcagctgcggcgccagctggcggcagaaaatccccatataggcgatctcttccagcacgatggcgttatgcaccgcgtcttcggcgttcttgccccaggcgaacgggccgtgggaatggaccagcacgccgggcatctgcgccgggtcgattccctgctggcggaaggtttcgacaatcacgttgccggtttcccactcatagtcgccgttgatctccgcatcggtcattaaccgggtgcagggcaccgggccataaaagtagtcggcatgggtagtgccggtcgcgggaatagattgcccggcctgcgcccagatggtggcgtggcgcgaatgggtatgcacaatgccgcccagcgtcgggaaagcctgatacagcaggcgatgggtcggggtatccgacgagggctttttattaccctctaccacttcgccgctctccagactgaccaccaccatatcgtcggcggtcatcacgcggtaatccacgccggagggtttgatcacgaacacccctttctcgcggtcgacggcgctgacgttgccccaggttaaggtcaccagattatgctttggcagggccaggttagcttccagcacctggcgtttaagatcttctaacatagtgtgctccgaatagcaggcgagtcgggtatccctcaccccgaccctctcccggcgggagagggagaaaggcggcatggcgcccggtcggtcccctctccccaacggggagaggggaagggtgaggggacagcctcttagcgttttgaaccgtaatacacttcattccagcgcagcgcgtccttgaaggacggcagacgggtatcgttgtcaatgacggtcagctcgatatcatgcagctcggcgaactggcgcatatcgtcgaggttcagcgcatggctgaagacggtatggtgcgcgccgccggcgatgatccaggcttccgacgcggtacgcagatccggctgcgctttccacagggcgttggccaccggcagcttcggcagatcgtgcggcgttgggacggtttcgatggtattgaccagcagacggaagcggtctcccaggtcgatcaggctggcgacgatcgccgggccggtttgagtattgaagatcaggcgcgctggatccgctttgccgccgatgcccagcggctgaacgtcgaggatcggtttctcgacggtggcgatcgtcgggcacacttccagcatgtgcgagccgagcaccagatcgttaccattgtcgaagtggtaggtgtaatcctccataaaggaggtgccgccctgcagaccagttgacatcaccttcatgatgcgaagcagagcggcggttttccagtcgccctcgccggcaaagccgtagccctgctgcatcaggcgctgtacggcgagacccgggagctgtttcaggccgtggagatcttcaaaggtggtggtaaaggcgtggaaaccgccctgttcgaggaagcgtttcatccccagctcaatgcgcgcggcgtccagcacgttctggcgcttctcgccgtgaacctgcgctgccggggtcagacggtagctgctctcatattcatcgaccagggcgctgatatcgccgtcgctgatgctgttcaccacctgcaccagatcgccgaccgcccaggtgttcaccgagaagccaaacttaatctgcgcggcgactttatcgccgtcagtcaccgccacttcgcgcatgttatcgccgaaacggcacactttcagatgacgggtatcctgtttggagaccgcctgacgcatccagccgccgatacgctggtgggcctctttatcctgccagtggccggtgaccacgctgtgttgctggcgcatgcgggcgccgatgaagccgaactcgcggccgccgtgcgcggtctggttcaggttcataaagtccatatcgatgctgtcccacggcagcgcggcgttgtactgagtatggaactgcagcagcggcttattgaggatggtcaggccgttgatccacatttttgccggcgagaaggtatgcagccagaccactaacccggcgcatttgtcatcgtagttggcgtcgcggcagatatgggtgatctcgtccggggtggtgcccagcggcttaaggaccagtttgcacggcagtttggcttccgcattcaggctgttcaccacatgttcggcatgcttcgtcacctggcgcagggcttccgggccgtacagatgttggctgccaataacgaaccatacttcatagttatcaaaaatcgtcattttcgtatccttaatgggtgagcgctgccttagattgcggggctttttccgcctttgcagccgaagggagatagtgttgttccgcgctgaccgaccactgctggtagcgctgatagagttgttcgaaacgctgtgcctgcgccggacgcggctgcagggtagtttccacctggcttgccatccgctgttgggcggctggaatatcgtcatagacgccggcggcgacggcggcgaagatagccgcccccagcgcgcagcactgatcggaggcgacaatctgcagcggacggttcagcacgtcgcagcaggcctgcatgatgacctggtttttccgcgcgataccgccaagcgccatgacgttgttaaccgggatcccctgctcggtgaagcactccataatggcgcgagcgccgaaggcggtggcggcgatcagaccgccgaacagcgccggcgcgtcggtggccaggttaaggtcggtgatcacccctttcaggcgctggttggcattcggcgtgcggcggccgttgaaccagtcgagcaccaccggcagatgctccagcgatggattgttggcccaggcttcggtgagcgccggcagtaactgtttttggctggctttgatttgctcgcgcaacgccggctgctgctgagccagctgctccagcggccagccgagaatgcggccaaaccaggcgtaaatatcgccgaaggcggactggcctgcctccatgccgataaagtgtggaaccacgctgccgtcgacctggccgcagatgcctttgaccgtgcgctcgccgacgctctctttatcggcgatcagaatgtcgcaggtggaggtgccgatgactttcaccagcgcgttaggctgcgcgccggcgccaacggcgcccatgtggcagtcgaaggcgccgccggagatggccacactctgcgacagacccaggcgctgggcccactctgcgctcagcgtgccgaccggcacatcggccgtccaggtatcggtgaacagcggccaggccagatgctggttgatgatgggatcaagctcatcgaagaagctggccggcggcagaccgccccagctctcatgccacagcgatttatgtccggcgctgcagcggccgcggcgcagatcctgcggacgcgtagtaccggagagcagggcgggcacccagtcgcaaagctctacccacgaggcggctgcctgggcgacagcgctatcttcgcgggtgacgtggaggattttggcccagaaccattcgctggagtagatcccgccgatatagcgcgagtaatcctctttgcccggctggtggcacaggcgggtgatcgcctcggcttcctcgaccgcggtgtgatccttccacaggacaaacatggcgttagggttgtcagcgaattcttcgcgcagcgccagcacgttgccctcggcatcgacgggagccggagttgagccggtgctgtcgacgccaatgcccacgacgtcggcgcgctgttcggcgctcagcgaagcgagcacgcttttcagcgccgcttccatggactcgatgtaatctcgcgggtgatggcggaagcggttgttagcgccatcgcaatactgtccttcccgccagcgcggataccactccacgctggtcgccagctctgcgccggacgcgcattccaccgccagagcgcggactgagtcactaccaaagtcgaggccaatcgcaattgccatcttgttactccatgcagaaatcattcatgcagcaacagtagatatccccggcaaaatccgtcaggccggattcgctaatcttatggattattttgctgttaccttgcaaagtgtgacgccgtgcaaatattcgatgtggacttttctgccgtatttatagacacttttgttacccggcatatcacggtggaatgcacgctgctggcgcttttttcgcttgctgtgcgggtttttcgccaaattcccaccgccgtcgcagtcgcgacagggccgagagcgataaaatgatgaatatggacaattggtgccactgataccttcggggagaaccacgcgtatggccgaaacgcaaaacgatccgctgctgccgggctactcttttaacgctcatctggtcaccggcctgacgccgattgaggcgcagggatacctggatttctttatcgaccgcccgctgggtatgaaaggctatattctcaatctgacgattcgcggcgagggggtgatcaacaaccacggcgaacagtttgtctgccggccgggcgatatgctgctgttcccgcccggggaaattcatcactatggccgccatcccgacgccagcgagtggtatcaccagtgggtctacttccgcccgcgcgcctactggcacgagtggctcaactggccaacgatttttgcccagaccggctttttccgtccggatgaacagtggcaggcgcgctttggcgagctgttcggccagatcgttgatgccgggcagggggcggggcgctattccgaactgttggcgataaacctgctggaacagctgctgctgcggcggatggaggcgatcaacgaatcgctgcatcccccgctggacaaccgggtgcgcgaggcctgccagtacatcagcgaccatctggcggacagccattttgatatcgccagcgtcgcccaacacgtttgcctgtcgccctcgcgtctgtcgcacctgttccgccagcagctgggggtcagcgtcctcggctggcgggaggatcagcgcatcagccaggccaaactgttgctcagcaccacgcggatgccgatcgccaccgttgggcgcaacgtcggcttcgaagatcagctctatttttcccgcgtgtttaaaaaatgcaccggggccagcccgagcgaattccgcgcgggttgtgaataaaaagtaaagaaagtgaaatgatgacccgcttaaatgtcacagccagtaaactattaagacaattgatggcttgacgacggcgcgatggcttcggggaatccgggcttcgttttttaaccgggtacattatgcaagcattgctcgaacactttattacccaatccacggtctactcattgttagccgtgatgctggtggcctttctcgagtcgctggcgctggtggggcttatcttacccggcacggtgatgatggctggccttggggcgctcatcggcggcggcgaagttaacttctggcaggcgtggctggcggggattgtcggctgcctgctgggcgactggatctcattctggctcggctggcgctttaagaagccgttgcaccgctggtcgtttatgaagaaaaaccgcgccctgctggagaaaaccgagcatgcgctgcatcagcacagcatgatcaccattctgattggccgctttgtcggaccgacgcgtccgctggtgccaatggtcgccgggatgctcgacctgccggtggccaagttcgtgctaccgaatattatcggctgcctgctctggccgccgctctatttccttccgggcattctcgccggggcggcgattgatattccggctgatgaaaacagtgccagctttaaatggctgctattgggggcggcgctgctggcctggctggcgggatggctgtgctggcggctgtggcggagcgcgaaaacctcaggcgatcggctgacccgctggctgccgcgcggccgactgctgtggctgtcgccgctgatggtcgcgctggcggctacagcgttaacatttgtcttccgccatccgctgatgccggtctatctggcgatcctgcacaaagtcatcgcgcgctgatccccatcaaatgcgaggcgctgctgtggccgcttaacagctcggcggtggcgccatcccagacaatgcgcccttcggcgaccaccatcgagcgcggcgcgatgcgcgcggcgtcctctacgctgtgggagaccatcagcagggtgagctgctgctgctcgcagacatcggcgaccagggacagcatctcctggcgcagtgccggatcgagcgccgagaagggttcatccagcagcagcaccggctgctggcgcaccagacagcgggccagcgccgcgcgctgccgctgaccgccggagagctcgccgggcagacgttccagcagcgcatcaattcccatctgtccagctatcgccgtgacctgcgcctgctgctcgcggctcagtttaaggcctgggtggatcccgaggctgatattttgtcgaatggtcagatggttaaacaggttattctcctgaaacaacatcgagaccggacgctgcgccggcggcgtcgcgttatgcgcctcgccgttaatcagcaggctgccgctggcgggtggcagaaacccggcgatcagattcagcagggtgctctttccggcgccgctgggaccgagcaccgcgatgcgctccccgcgcgcgacgtcgagggtgaagcgcatcggcagatgctggtatagccaggtcacatcattgagttttagcatcacgccccggaagtttttcaatcagcgtaaacaacaagaaacagagcagcagcaggagcagggcggtgacggccccgtcctggctgcggtaggcgcctatctgctggtacagatagaaaggcagggtgcggaacgcctcgttgccgaacagcgccaccacgccgaaatcgccaatcgacagtacgcaggcgaaggcgagcgcctgggccagcgggcgccggagagcgcgaagctcgaccacccgcagccgggcaaagccttcaatacccagcgactggcacagcatgctgtagcgggcggcaatgtcgcgcatcgggttttccagtactttcagcgcataggggatcgccatcagggcattagtgaagatgacgatgccgtcggcggactccggcaggccgatagtgttattgagcagcaggaagaagccggtcgccagcacaattcccggcatcgcaaggatcagcatgccgctcagctccattgcctgcccggccaacggccgctggcgagcgcgcagctcccggctgctccataacagcatcatcgtcagggtcacgctcaatagcccggcggcgatggcgatgcgtagagaggtgctcaatgcctgccagagcgctggctgcgccagcacgtccagcatattacggttgatcccgtcgacgatgaccgccagcagcggcgggagcagcagcagcagggcggcgccgatcagcaacccgtcgctcaggcggctatgcaggcgatcgtcagggtcgcgccagccgcgcacatggctgacgccgatggcgacggctttactcagacgctggctaagcagcaccagcccaaggcagcagagcatctggatcagcgccagcattgccgctcgcgccggatcgtagtcaaagctcagcgcctggtagatagccagctcgatcgtggtggctttcgggccgccgcccagcgagagcacggtggcgaagctggcgaagcagagcataaaaatcagcgcggcgacggcgggaatgtgccggcgcagccacggccattcgacgaggcggaagaaggcatagccgcgcatgccaagctgggcggcaatttgccgctgctcgccgggaatgttctccagcgcctgcagcagcaggcgggtcgccatcggcatattgaaaaagacgtgcgccagcaggatgccctgcagaccgtagggcgagaactcccattgccagccgagcgcgttaaatagtgaggccagccagccctggcggccatagacgctgaggataccgaacaccgccaccagcaccggcaggatcagggtcatcgcgcacaggcgcagcagcaacgtacggcccgggaagcgacgccggtaaagcgcgcgggcgagaaagatggctggtcccaccgagatcagcgctgacagcgacgcctgccagaaggagaagcggaccacatgccacaggtagctatcgctgaagaccgattgccagcccgcgccgggggcgctaaaccacagcgccagaaacgccgccagcgcgacagcgcacagcagcgtagcggcgaacaggcccggcatcagcccgcgaaggtttagcggctgacggcgcgttgccatgcgctaatccaggtttgacgctcgctggcgacctgctgcggggtaaaggacagggtggtctgcggcttcaccagggtatcaaacccggccggcagggtgacctgggtcaccggatacatccagttgccggtagggatggcgttctggaagccaggagataccataaatttgaggaatttttccgccagttccggctgcttgctggcggcggtacgcgcggcaacttcgacctgcagatagtggccctcggcgaagctcgccgccgcatagttgtctttcttctcttcaatcatgtggtaggccggcgaggtggtatagctcaacaccaggtcgctttcccctttcaggaacaggccataggcttcgctccagcctttggtgacggtaacggttttcgcggccagcttctgccaggcctcgggcgcttgatcgccatagaccttttgcatccacagcagcaggcccagtcccggggtgctggtacgcggatcttcatagatgacccgccatttttgcgggccctcgaccagctctttcaggctcttcggtggattagccagtttgtttttgtcatagacgaaggcgaaatagccgtagtcgtagggaacaaaggtgtcattatcccagccgcccggcacgctgaccgcgctggcgggtacgttgcttttggcaaacagtttactctgcgccgcggcttccagcaggttgttatcaaggccaagcacaacgtcggccttgctgtttttgccttccatgcgcaggcgattcagtagcgaaacgccatcttccagcgcgacgaacttcagctcgcagccgcactccgcttcaaaggcttttttgaccgccgggccggggccccagtcggcagagaaggagtcataggtatagacggtaagaacaggcttagccaaagcgggcatggcgaccagcgccagcagcgggagtaattttttcaacactttgcacctcagaaaaaaggggtggcaaaggattttgagtgagcctcaaatcccttcgccggcgttatccggatcaggttcgacgggtattttctcagcccatgcgcttcatccttcaagccgcatctgcgttagcttcgcgcgttcaccccagtcacatagttatctatgctccaggggattcacccgcttgctgccttgatgcaacttgaatgatattgcgtatgtttattagcaccccgttgagaacggccttagtgtaatgattttgtcagatgacggaaagcgcttacggctccggcggcgcaaaccatgcggatttaaaatcgaaccagccgagggtattcatcctcacgccgcgcatactgcgctgaccctgaatcatcagccagtggtggatcagcggcacgatatgttgcccggccagcagccgctggctccaggtggccggattaaactctcctgctcgccagcggcaggcgtctgcctgccagtcaatggggatgcagcgctgaatcagcgggacttcgtacagataggcgaagagcgaaaattcgatcggtaaggtgaagttcacgctgttgagccagatatcgctgaccacctcgccgcgatgccaggcatcgtactccagctcctggatctccagctttacctgatgcgccgtcagcaggtcgcgcatgatcccgccgatcacccgatgttcgacgtgatcgcggtagtaggtaagggtgactgtctccagccccgccggcttctcgcaggcgtggttgctggcgtgatgccagcgcggcagcaggccgtaggcgggaaaccagttgccctggtagtgttcgcccgcatggtagagcaggttggcgggctgaaacagatagcttagccagcggcgcaccgcgtcgttggcccccagcgggcttcgcgagtcgaacagcaggtaatagcagccctcttccaggcgactctccaccgctttttcgctttcggtattgccctgcagcgtcaggccgccgttgggctcttcgctaatctccggcagcacccagacgttcacctcatcgatcagcgcccggtagccaaaatagtcctcaaaggcatggatcttgagctgattctggttgttacgcaccacggcataggggccggtgccgaccggcatggaggaaaagtggttcatggtctgccactcctgcggcagcaccatcgccggcacctgccccagcagccagggcagccagcggtcgggctggcgcagatgaatatccagggtccaggcggtgggcgattcgatgcgttcgatatgtgaatagagcggcagggcattgctgcgctgcagagaggcgatcacatccgccatctccagctcacggccatggtgaaaatggatgcccgggcggaggaaaaagcgccagtgggtgggcgacaactgctgccagtggtgggcaatatcggcttccagttccccattttcctcatttacccgcgtcagggcgctgaaaatctgccgggcaatatgcgtttccgaacgccgcagcgcgctaccgggcagcaaattcttcattggtcggtagtagagcacgcgcaggatgtgccgcccctggcggaagctgcggccgagatgcgagaccagcatctggcggacggcagccttatcgccgaccaactgcaccagctgatcgatgcgatcctgctcaaggagatcttcggcacgttgctgctgcagggcgaggccggtatagagaaaggttagccgcgaacgcttgccgcggcctgcctccgcttcccaggtcagccagccgcgggactccatcatattgagcagggtgcgcatatggcggcgcgagcagctcagcatttccgccagctcgttaagggtggtctcctgcgacttgccgtcgcagcactgccataggcgaatgaactgttgttgcagacggccggaagacataaaaggggaactcctgcgcaaaactcagcaatttattacttcctatattaagccaataatgaatcccgatgaagcgaggaggtgaatatgatgaggtctaccgcaaaatcgttctaccaacgctacttttctgcgacgcaggaagcgtcctggctggcccgcctgatggcaggacgacagcaggaaattctgggggaactgatgcagtggggagtgacgtcaacgacctctgatcattgacttgcagacatcatgtgtgactgagtattggtgttatactcgtcgtttttcaaactgcaggtgcgctgtcgatgtttcctgggccgtatgttctggctgcgtgattcgcctctacgggactcaccttttcagggccagcgcgagcgcggcgcaaaatggttaaccgttttgtcctgcagcatgaaatccatagagtatagaatcacccgccagcagaatgcctctgctggcttttttcgttttcttcgcgtgtgttaaggacattccatgctgtggttgatgacgatgggacgacggcttaacggcgtctatgccgcctttatgctggttgcttttatgatgggcgtggcgggcgcgttgcaggcgccgacgttgagtttgtttcttagccgcgaagtgggggcgcaaccgttctgggtgggcctgttctataccgtaaacgccatcgccgggatcctggttagcctgtggctggccaagcgctccgatagccgcggcgaccggcggcggttgattatgttctgctgtctgatggcggtgggtaatgcgctgctgtttgccttcaaccgccactatctgacgctgatcacctgcggcgtgatgctggcatccattgccaacgccgccatgccgcagctcttcgcgctggcgcgggagtacgccgacagctcggcgcgggaagtggtgatgttcagctcggtcatgcgcgcccagctgtcgctggcttgggtgattggcccgccgctggcctttatgctggcgctcaactatggcttcaccaccatgttctccattgcggcgggcatttttgtcattagcctcgctctgattgccatcaaactgccttcggttccgcgtgtggaacagccctcggaggaggcggcggcgctagcgcaggccggcggctggcaggacaagaacgtgcgtatgctgtttatcgcctccaccctgatgtggacctgcaacaccatgtacatcattgatatgccgctgtggatcagcagcgatctcgggcttcccgacagcctggccgggatcctgatgggcactgccgccgggctggagataccggcgatgatcctcgccggctactacgtaaagcgctttggcaaacgtaaaatgatggtggcggcggtggccgccggcgtgctgttttatgccggactgatcctgtttcatggtcgcacggcgctgctggctctgcagctgttcaatgccatctttatcggcattatcgccgggataggcatgctgtggttccaggatttaatgccgggacgggcgggagcggcgaccaccctgttcaccaacagtatttccaccggcgtgatccttgccggcgtgatgcagggggcgctgtcccagagctatggtcacgccagcgtctactggacgatcgcggccatttcgctggtgacgctgtttttgaccagcaaggtgaaggatatctgactactcgccccggcatcgccggggcgaccaggcctacttgagttcgatacgcttaatgtcgccgatgataaaaatgtaggcaatcaccccaatcagcgccgtcaggccgacgtagatcagcgcgtaaaagaaattacccgtggcggaaataatcacaccaattatcagtggtgcgataatcgaggccatattggcacagaaattaaatatgccgccggtgaggcctgccatattttccggggcaatatccgaaattaaggtccagcccagaccgaccatcccctggccaaaaaaagccaccgacatgataataattacggtgctattggcgcttacccaattcgccgcgataatacagctggacagcaataaaccggaaattattggtaactttcgactgatgttgacggagccggttcgcttcaacaaccggtcggagatccagccgccgaagaggatgccaatcgcggcggcaaggaagggccaggtggcgaagaagccgacgtgcagccatggaagatggcgctcgttggcgaggtagctgggaaaccacgtcaggaaaaagaccagtgtggtgttgccggcgaactgacccaggctggcgccgaggatctggcgacagcccagcaggcgtctggcgtcacgccagttaaatggaacgttctggattttattgttaatgctgcttgcgccgatatactccagctccgcttgattagccgtgcgcgattcatgcggttcatgataaaaacgccaccacactaaagtaaataaaatacctaatccgccggtgaggaaaaaaagcgttctccagccatgatgttcgagaattaaaaataacagcggcgagaaagcggccagccctatatattcaccaactgtatacgttgccgttgcccgcgcgcgctcatgctgagggaaccaggtgctgacgatgcggctgttggccggaaagcagggcgcttcgctgacgccgagtcccaggcgcagaagcagcagggattttaggccgagggtgaaactttgcagcagggtaaacagcgaccagaagaaaattgacagggcataggtcactttgttgccaaagcggtctaaaaacatcccgccggggatctgcgccagcgcataagtccaggcgaaggcggagaagatgatgcccatcatcgccggatcgatatggatttctttgcttaactgtggcgctacaatacccaggatggtacggtcgagataatttatcatcgttccgacggagagtagcagcagaataactatccgtacgcggcttctttttttcgcccccgatgtggaagtgaggacttcctgagagtttgacatactcatagcgagttcctttaaagtttaaaatatttttgcatatattctaatatgcaaaaatatctcaaggagctataggtagtatctatgaatggcaatgccttgtggcacattcatgcccttcgccaaataatatttgatgtaacgccgatatttacccgttcatgcgcattattggtggcttgcatggtatattagcgtcagtgcatttattcttatattatacgggtaaaaataatgaacctaaagcaactttattattttaaacgtctgtctgaaactgagcattacaccgaagccgcctccagtctgtgcatcacccagccctcgctaagccacgcgatatcggagctggagaaggagttaggggtcgcgctattcgccagacaggggcggaacgtaaaaattacccaaaacggcaagcgttttttgccgtatgttgaagatgcgctggcctcgctggagaacggacgcatgatattgcaaaaaaatggcgctgagaataaagagaatattcgcatcgcctttatttacacgatgggggagtatgttgttccacagttaattaataaatattctctttcacctgaatgtcacaatgtgactttttcttttactcaagggacatcgctgacgctgttgcaggagctgaaggccggaaaagtcgatctggcgatctgctcttatattgccgatgaacccgatatcgattttattccggtgatccagcaggaactggtggtggtcacggcaaaggatcatccgctggcccggctatatgaacatgaagtcgatctggtggagacgattcattatccgtatatctatttttcagaaaatagcggcttacgtccgtttatcgataatgtatttatgcagcaaaagctggtgccggagatcgcctgctatgtggatgaggatacggcgatggccgggctggtgagtattgactacgggatcgcgattatgccgcgcatcaccgcgctctcctattacaatgtccatatcctgaagattaaaaacaccatccccccccgctatatctatctggcgaccatgaaagacaaggggctctctccggcgctggagtcatttaaaaatgtggttatccacgacagccagaagatctgttaacggatggcccggatgtgacctccgggccatccggatatcaggagagcatatccatcacttcacgcagcttagcgatggcgatctgccccggcgcggaggcctgaccaacggtaccgaaggtcatcgccgaaccgaacaagcgcccggtgacccggctaacgccaccggatttgcccatcgacatggtgatcagcggacgcgtcgcatacttctctttcatggtcagcgtggcggcgagcaaggtgagtacgtcctgcggcgactgcggcatcaccgcgatcttcggcagatcggcccccagatcctgcatgcggcgcaggcgatagataatatcttcctgagcgggggtcttatggaaatcatgattactcatgatcaccttgacgcccgcggcatgcgcatcgtcaaccagcgcgcggatctgcgcttcatcattgaacagttcgatatcgataacatcaaccagtccactgcgtgcggcctcgcggttgagcgcaaaataggcttcgtcgctgagctcggtttcgccaccttctttcttactgcggaaggtaaacagcagcggaagcgctttcagcgcgccacggatttccgccagcgcggccatcacctgggccatctctctgacctgggcaaagtggtcaacgcgccattcgataatatcggcgccggcatcgaccaggccgtgggcgttacccagtatctcatccagggttttaccgatcagcggtacacaaatgagggtttccccttcctgaaaggtgatgttctttacggttactgcatttgtcatgtaggtatccattatttttcgcgttgtacttcaggcggtgactgcggtgcgtgatactttttgcgccgcccgagcctgcagttgacgatagccgatgtacagggcgatcacaaagccgataacggcgatcagaaaatcaaaccacataatgctggcaatactgatctgcgaaagctttgcggtgatcaacgggatcgtgaagctggcgatactgccggcagtgtagaagatgccggttgctttgccttttccgttcgggaagctcatcgccatgattgtcgcacccagctgcagcactccgccagcggcggcaaagccgatgacaaaagcaaagccggtcaccatcatcggcgtcgggaacaggcacaccaacagcagcgaaatcatcgacaggccagtataaataatcatcgcaatggccgagctaaacacctctttgacgaaggcggcagttacaaagacgcagaccagcgagccgacggtatagatgctaagcagtttaatcgccgaggcatagggcaggccgacgacgaactggccgtactgcgccagccattggctgaccagatagaaggtcgccatgccgatataaccgtacagggtgaagatcaccatatccagcttattagcctgtggccggacggctgtttccgcctgtgccgtaggggcttcctcttttttcgccgcctggctgtcagggaacggcattttaagcagataaatcccgctcagtacaaagagcgctgccgcaatcacgaacgaccagccgaaccacagatttgcccatatcaggaagctgataatgaacggcaacaggaactgccctgcagagacgaaggctttgatcagcacgttggcccggctggcagagtgcgggaaagattccatcagcgccggataggtaccggagtcgaggaagctgttcgccaggcccgccataatgccgaacacgtaagccagatagatatttttggtcagcaggatgccgacgaaaaagatcaggtagctaaggatcccaagatagataaagggcttgcgaccgaagcgatccgagagaaatccggtcacgatggtcgctaacttaccaatacctaacgaagatataacgatcgatacgccggctttgtctgttccccactgttcctgaagatgggccatgttgagggtgattaacagcacccccataccgtggatcaggtagttgagatacagccctgccgcagtagggatgtatttatttttcatcattcgcctcttagaacagaatgctcttgatgtaatcaaccggcatctgtttgcccgtccagatttcgaacgcgcgcgcgccttgccacagcatcatccccaggccgttcagcgtgcggcagccttttttctcggccacttccagcaggtgggttttgcgcgggttgtagacgacgtcggagacgatcaggtccggacgcaggaagctgtcgtcaggtagcagcatctggccttcgaacggcttcatgccgaccccggtggcattggtcaggatcacgctgctgtcaatttcggcgcgcagtttgtcatgatcgtcgagatcgaacagatggatctcgcagtcggtgttgtggcggatcttggccacggtttcttctgcgttggcgaagaatttatcgcggcggttgaagatggagatcgccttcacgccatccagtgctgcctggacgcagagcgccgttgccgcgccgccggcgccgagtacggtcatcttcttgccgatgatatcgataccggcttcgctaagggcgcgcatgtagccggtgccatcggtgatatgtccggtcagtacgccgtcgtcgttgaccacggtattgaccgccccgaccagctgtgccgccggcgacagtttatcgagatactggcaaatctcggttttgttcggcatagagacgttaaaaccgcgcagcttcatcgcccggaagccctgcaccacgtcttttagctcctggttaccgacttcaaaagcgagatagacgtagtccagcccgagatgggcgaaagcctcgttgtgcatggtgggcgacatgctgtgacgaatcggggtggcgatcaggccaatcagctcagtgtgtccagtaatacgttctgccatgacaaaaatcctcaataagttagaaagggaattcgttgtgcttcgcggctgcccagcgcacccatgtcttccagtgcatccagtacgttgcggccttcgcggacgccatcgataatgcgtcgcgccatcacgctgtcgccgatgttcatgattttgacgttattggcattggcccagcgctcgatctcgtcgagacccgtccggttggcgcgcatccccagacagacaaagccgtagtcgaagggaatatcgaaggtttgctgtgtatttttcacctggaaatggtcggcagcgaccgccatcagttgggtattcatgtgctgttcgacctggtgctcgtcgagcatggtcaacatggcatttttggtaatgatgtcgagatcgcgaccggcggcgtcctgcatctcgattagcaccgcctgtgcgccgcgagcggtaaagtattcgataacgtcaaggccaacggcgccagcgccgactacggcgatgcgtttgcccttgatatcggtaaatttcgccagattgtcgatcatgccggtaatggaaaagatcttgccgttctcgacgtcaatgttttcccgcaagccttcaatgggcggcagcagcggcgttgagccggtggcgttgacaatcagatgcggacgcagggcggaaactgaagccacgtcggcccgcttgccgatctgcagcatcaggttgtccagcgaggcgatacgatttttcataaactgcgggaaatcagcgatgcgttttttctccggtaggcgggagatttcgctggcgaggccgccgacgtggtttttcgcttccagcagccaggtatggcaaccaacttccgccgcggtgcaggcggcttccatcccggcggtgccggcgccgatgaccaccacgttagtgtcgcgattcacgcgccgcattttataggcgtcaccgtgaataatatccgggttaatcgaacagcgcagcgggcgcgagcgggcgatgcgatggtcggcgcagccgatgttgcaggagatacatttgcgcatcagacgctcttttccgccttgcactttctgcacccactccggctcggcaatcagaccgcggccaatggcgataagatcggcatcgccgctggcgaggatatcttcggctacctgtggagtgcgaatattgccggcgatgaccgtgggtttatggaatttatcgcgcaccgcgcgggagagatagcgcttccagccatcctccagcgacatctgatcgatttgcagattcaggttgtcgttctgtgccgcagagacgttgatgatatcgaccttctcctggcagagctcaagaatacgcagggaatcttcgagggtattgccgcccttgaggaagtcgtcggcgctgatgcgcagactgaccggaaaacgcggccccacgcaggcgcgaaccttatcgacaatcagactcagtatccgagtgcgattttcgacgctgccgccaaattcatcagtgcgcttattaaacagcggcgataaaaactggctaattaaataggagtgaccggcatgaatttcgacgcagtcaaaacctgcgcgccgaacgcgctccgcggcgtcaccaaatttttctaccgcatgatatatttcctcatgggtcatcggacgcggaatattaccgtgcttcttcgacggcgttgtagaagaggagagcggcgtctggccttccagtcggtaggcataagcggaagcgccggcatgatttaactgaatggatacgcaggcgccatgtttatgcagggtctcggttaatttaaacagccgtggaatatattgatcgttatcgatgcgcagttgggtggtgccgttggaggcgaaggggaaatcaatacaaatattttcgatggtgataagcccggtgccgcctttggcccgcagttcgtagtattccagctgttcctgcgacacctcgccattgagcgtggccatattggtgcccatagggggcataataatgcggttttttaacgtcataccgttgatggtcaacggactgaaaaggtgcggatagtggctcatctcttctctccacaggaggccgggaggccgatatgcggggcccaggcgtgtccttagttaatatttctctgtggcaaaagataacgaggggaaaaatcgaaaaataatgcttttttttgtgcatagcaataggggttctctatgagattaacgctttcttcacattcttatatttttatattaaacactcgtgccttatttttacttgcagtgcagggaaaatacataaacagtgctggagaaggggaggaaagcggaataattcttctttaggcggtagggcagggtggcggtaaggtctgacaatcagcacattaaaattggtttttgtgcgtgagatcgcaattttctccgcaataaaataaaaagcccgatcaaatgaccgggcccaaaggttaattcataaatgccggcagcttgcgttcatagtcggagatcgccgcttcatgctgcagcgtcaggccgatgctatccaggccgttgagcatgcagtggcggcggaaatcgtcgatcttaaagctgtaggttttatccccggctttaactacctgcgcttccagatccacttcaaacgtaatgcccgggttggcctgcaccagcttgaacagttcatcgacctgctcgtcgctcagggtcaccggcagcagctggttattgaagctgttgccgtaaaagatatcggcaaagctcggggcgataacgaccttaaagccgtaatcggtcagcgcccacggcgcgtgctcgcgcgaggagccgcagccgaagttttcccgcgccagcagtatcgatgccccctggtactcaggaaaattcagcacgaactccgggttcggctgttgacctttatcgtcgagaaagcgccagtcgttaaacaggtgcgcgccaaagccggtgcgggtgaccttctgcaaaaattgcttagggatgatcgcgtcggtatcgacgtttgcagcatccagcggaaccaccaggccggtatgttgggtaaatttctctgccatgatggtctccttacttcagattacggatatcggcgaaatggccggtaacggctgccgccgcggccattgccgggctcaccaggtgcgtgcgtccgccgcggccctgacggccttcaaagttacggttgctggttgaggcacagcgttcgcccggattcaggcggtcattattcattgccagacacatagagcaaccaggtaagcgccactcaaagccggcttcgataaagatcttatccagaccttccgcttccgcctgcgctttcaccggaccagaacccggcaccaccagcgcctggacgcccggcgccactttacgccctttagcgatttccgccgcggcgcgtaaatcttcgatgcgcgagttggtgcaggagccgataaacactttatcgatagcgacttccgtcagcgggatcccggatttcagccccatatagaccagcgctttttcggcgctggcgcgttccaccggatcgctgaacgacgctggatcggggatgttatccgtcaccgagatcacctggcccgggttggtgccccaggtcacctgcggggcaatttccgccgcctgcagcgtcaccacggtatcaaacgtcgcggcgtcgtcggttttcagggttttccagtacgctacggcatcgtcaaaatctttgcctttcggcgcatgcagacggccgcgtacgtaattgaaggtggtttcgtccggcgcgaccaggcccgctttggcgcccatctcgatcgccatgttgcacagggtcatacgcccttccatgctcagatcgcggatcgcttcgccgcagaactcaaccacatggccggtgccgccggcgctaccggttttaccaatgatggccagcacgatatctttggcggtaatgcccggcgccgctttgccctggacttcgattttcatggtcttcgcgcggccctgtttcagggtctgggtcgccagcacatgctccacttcggaggtgccgataccgaacgccagcgcaccgaacgcgccgtgggtggcggtatgggagtcaccgcacacgatcgtcatccccggcagggtaaccccttgttccgggcccatgacgtggacgatgccctgatacgggtggttcaggtcgtacagttcaacgccgaactctttacagttcttaatcagctcctgcatctgaatgcgggccatctcaccggacgcgttaatgtctttggtctgcgtcgagacgttatgatccatggtagcgaaggttttacccggctggcgcacctggcggccatgggcgcgcagaccgtcaaacgcctgcggagaggtgacttcgtgcaccagatggcggtcgatatacagcagcggggtttcgttctgcgcctcatacactacgtgcgcatcaaataatttttcgtataacgtcttcgccatgattacaccccttctgcgacatagcgggcaataatatcgcccatttcatcagtgctgaccgccgccgtgccgcgcgctaagtcgccggttcgaaccccttcttctaaggcgcggttgatcgcgttttcaatggcggtcgccgcttcgtcagcgtcgaggctgtagcgcagcagcagagccagggagaggatctgcgcgatcgggttggcgatatttttgccggcgatatccggtgcggaaccgcccgccggctcgtacaggccaaaaccttgttcattgaggctggcggacggcagcatacccatcgagccggtgatcatcgcgcactcgtcggagaggatgtcgccaaacaggttggagcacagcagcacgtcgaactgggacggatctttaatcagctgcatggtggcgttatcgatatacatatgcgccagctcaacgtccggatactccttgccgatctcgctgacgatttcgcgccacaggatggaggactgcagaacgttggccttatcgatggaagtcactttgtgacgacgcttgcgggcggattcaaaagcgatgcgcgcgatacgctcgatctcaaagcggtgatacacctcggtatcaaaggctttctcatgctgaccgctgccttcgcggcctttcggctggccgaagtagatgccgccggtcagttcgcgtacgcagagaatgtcgaagccgttagcagcgatgtcggcgcgcagcgggcagaactcttccagcccctgatacagtttggccgggcgcaggttgctgaacagtttaaagtgtttacgcagcggcagcagcgcgccacgctctggttgttccgccggcggcaggtgctcccatttcggaccgccgacggagccgaacaggatcgcatccgcctgctcgcatccggcgacggtcgcctgcggcaggggagttccctgacggtcgatggccgccccgccaacgtcatactggctggtggtaatgtgcatggcaaaacgttggcgcacggcttccagtactttcatcgcctggttcatcacttccgggccaatgccatcacccggcaaaacggcaatatggtaattcttcgacattacacggtttccttattgttctctttattctgagctttgcgttgcaattctttttcgacttcggcggcgcgccagatgttgttcagcacgtgaaccatcgctttggctgacgactctacgatatccgttgccagaccaacgccatggaagcggcggccattgtagtcaacgacgatatccacctggcccagggcgtctttgccgtggcctttcgcgcttaagccatacttcactaattcaatgttgtagtcggtgacgcgattaatcgcctggtagatagcatcgaccggaccgttgccgttggcggcttcggttttgatctcatccccgcagaccagtttgatcgaggcggtggcgatatcgctggatccggattggacgttgaagtaatccaggcggaaatgctctggctcttcctgctgcttgttgataaaggccagcgcttccagatcgtaatcgaagacctggccttttttgtccgccagcttcaggaatgcgtcgtacagatgatccaggttgtaatcgctctcctggtagcccatctcttccatccggtgtttcaccgccgcgcggccggagcgggaagtcaggttcagttgcacctggttcaggccgatagattccggggtcatgatctcgtagttttcgcggttcttcagcacgccgtcctggtgaatgccggaggagtgggcgaaggcgccggtgccgacgatggccttgttcgccgggatcggcatattgcagatctggctgacggtctggctggtgcgccagatttcatgatgattaatgttggtgtgcacgttcatgatgtctttgcgcactttgatcgccatgatcacttcttccagtgcgcagttgccggcgcgttcgccgataccgttcatcgcaccttctacctggcgcgcaccggcgtggaccgcggcgagggcgttaccgacagcgatgcccagatcatcatgggtgtggacggaaataattgctttgtcgatattcggcacgcgatcatacaggccgctgatgatgttggcatattcgaacggcatggtatagccgacggtatccgggatattaatggtggtggcgccggcgttgatcgccgcttccacgacgcgagccagatcggcaatcggcgtacggccggcgtcttcacaggagaactcaacgtcgtcagtgtagttgcgtgcccgcttcaccatatagatcgcgcgctcaataacctcatccagcgtactgcgcagtttggtggcgatatgcatcggcgaggtggcaataaaggtatgaatacggaaagcctcggccacttttaacgattccgccgccacgtcgatatctttctcaacgcagcgcgccagggcgcacacgcggctgtttttaatggtgcgcgtgatggtttgcaccgattcaaaatcgcccggcgaggataccgggaaaccgacttccattacgtcgacccccattcgctcaagggccagtgcgatctgcagcttctctttgacactcaggcttgcctgtaacgcttgttcgccatcacgtaaggtcgtatcgaaaataatgacttgctggctcatggtttggatccttagtctgtgtcctggcgccttgttgacgagcataaaaaaacccgcgccaaggcgcgggttttatagtcttgctggaagatgacttaacgctgaacgtcgcccaacagcctaccgcgcaaatggcatgcgtttagtagtagtaggctggtgatacgagcggtgcgaatcattgcgtcaaactccagatgaaatcgttatgcttttagagttactggatagctgttttaaagtcaacccctggcatggaaaaagcgttttgggctgactaaatgaattagcaaaatgtgctgatgtaagccccattttgccgaagatcctattttggaccgaaagcggtttatccccatttgtttcatttgaaaaagtgctttgcattcaaggcatcgtcgaacaggtgtcgccaatgaagggacaaaaaacggtatctggatgaaaatattaaatttatttttcctgtgaatgtattcgaacgctagcggattatttttcaatgataaggatttgttaattttatggagggaaaaataaaatactttattattgcttaagttacagttaactcgtggtgctgtttttatttttatggattatggttacacttatcatcattaagtaatcagtatggtttgagcggctcagttttttgatcaggaccgtttcttcactgccactcatagccttgatatattcctaaaaatttcttttgctattttgtaaatgtcatttgcatggtaaatgatattttcggcgctaattatagcggtttagtgaagggaattcatcgtgacggcggaattagatatgttaattgaaactccagaatataaatcagcccccggacaggaagtcgttaaacctcaactacggatggttgatctcaatctgcttaccgtttttgatgcggttatgcaagagcagaatattactcgtgccgcccatacgctcggcatgtcacaacccgcggtgagcaatgcggtttcacgactgaaagtgatgtttaatgacgagctttttgtgcgctatggccgcggtattcagccgacggcgcgcgcctatcagctgtttggctcggtacgccaggcgctgcagctggtccaaaacgaattgccaggctccggttttgaaccgctgagcagtgagcgcgtgttccatctgtgcgtctgcagcccgctggataacatcctgacgtcggttatttttaataaagttgcagagatagcacccaatattcatttagtctttaagtctgcgctgaatcaaaatacggaacatcagctacgttatcaggaaacagaattcgtaatcggttatgaagagttccgtcgccctgagtttgcctgcgttccgttatttaaagacgaaatggtcctggtcgccagtcgcaaccatccgcgtatttccgggccgatgatggaggcggatatttatcgcgaggagcatgccgccgttgctctcgaccggtatgcctcatttagtttgccgtggtatgacacggccgataaacaagcgcgtatcgcctatcagggtaatgcgatggtcagcgtattaaacgtagtatcgcaaacccagatggtggccattgccccgcgctggctggcagatgaatttgctgacaagcttgccctgcaaatattacctttgccgttgaaggtcaacagtcggacctgctatctctcctggcacgaagccgctggtcgtgataaaggccaccagtggatggaagagctgttggtggacatttgcaagcgctgacccgacgacgatagatagcaaaggagcttcggctcctttttttatatgacataaatcaaataaagcagaattttattctgtttaccttgcgcgaggggttcgttgtgttcgtgaaaaatggatctattcctgttatcaccctttttcgccgagtatttaccattctcttttcttatctctgaagcaattcaccatattttcccctcaccgctttcttttcttcttattcaagaaataaggcctcagctgcggcgaattgcctgcctgctggcgagcagttatggtagtggcatgcagtacattcacctcaatgcggaggaccactccttcgcatcgtgcgagcgcgcggaaattgagttccgctgtcgtaaaacaataagcctggaggcaaaccatggagatgttgtcaggagccgagatggtcgtccaatcgcttgtcgatcagggcgtcaagcaagtattcggctatcccggaggcgcagtcctcgatatctatgatgcgttacatacccttggcggtatcgatcatgtgctggttcgtcacgagcaggcggcggtgcatatggcggatggcctggcgcgggcgaccggggaggtcggcgtggtgctggtgacctctgggcctggggcgacgaacgccatcactggcattgcgacagcctatatggactctattccgttggtgatcctctcggggcaggtagccacctcgcttatcggctacgatgccttccaggagtgcgacatggtggggatttcccgtccggtggtgaagcacagtttcctggtgaagcagaccgaagatattcccggcgtgctgaagaaagccttctggctggcggccagcggtcgccccggtccggtagtggtcgatctgccgaaggatattctcaatccggcgaagaagctgccttacgtctggccggacgcagtgagcatgcgctcgtataacccaaccaccagtggccataaagggcagattaaacgcgccctgcagaccctggtggccgcaagtaagccggtcgtctacgtcggcggcggggcgatcaatgcgcattgcgaacctcagctgcgcgagctggtggaaaaactgaagctgccggtggcctcatccttgatgggacttggcgctttcccggcgacacactcgcaggcgctggggatgctggggatgcacggcacctatgaagccaacatgaccatgcaccactcggacgtgatttttgccgtcggcgttcgctttgacgaccggaccaccaataacctggccaagtattgtccgaacgcgacggtactgcatattgatatcgatccgacttcaatctcgaaaaccgtgccggcagatgtgccgatcgtcggcgatgcccggctggtgctggagcagatgctggagctgctggagcaggaggaagcgcagcagccgctggacgacattcgcgactggtggcaacagatcgagcagtggcgtgcccgtcattgtctgcgctacgacgaccagagcgataaaatcaaaccgcaggcggtaattgaaactatctggcggctgacccagggcgatgcctacgtcacttccgatgtgggtcagcatcagatgttcgccgccctgtattaccccttcgataaaccgcggcgctggattaactccggtggtctcggcaccatgggctttggcctaccggctgcgctgggggtcaaaatggctctgccggacgaaatggtggtctgcgtgaccggtgacggcagtatccagatgaacattcaggaactctccactgcgctgcagtatgagctgccggtcctggtgcttaacctcaacaaccgctatctcgggatggtgaagcagtggcaggatatgctctattccgggcgtcactcgcagtcctatatggaatcgctaccggactttgtccgtctggcggaagcctatggccacgtcgggatccgcatcagcgagccgcaggagctggagacgaagcttgctgaagctctggagcaggtgcgccagcgtcggctggtgtttgtcgatgtgaccgtcgacggcagtgagcatgtgtaccccatgcagatccgcggcggcggcatggatgaaatgtggttgagcaaaacggagaggacctgattatgcgccggatattatcggtattactggaaaacgaatcgggtgcattgtcccgcgttatcggcctcttttcccagcgtggctataatatagaaagcctgactgtcgcgccgacggacgatcccactctctccagaatgaccattcagaccgtgggcgatgaaaaagcgattgagcagattgaaaagcaactgcacaagctggtggatgtcctgcgggtcagcgagctggggcagggggctcatgttgaacgcgaaattatgctggtgaaggttcaggccagcggctatggccgtgaagaagtgaagcgcaacaccgaaatcttccgcggacagattatcgacgtgacgccttctatctataccgtccagctcgccggcaccagcgataagctggatgcatttctggcctcgctgcgcgatgtcgctcggattgtggaagtggctcgctccggcgtggtcggcctgtctcgcggtgataaaatcatgcgctaaggatcgggaactgctgtaaaaatagcccggcagagactgtcgggctttttttttgcgaaatcagtaggaactgtaagcgaaagcggttgctgcgctaactattctgcgcttagatgttataaaaaggattccatacctgaataatggttatgtttggcacttcttacccaaggggcaattgtgaaactggatgaaatcgcccggctggccggtgtttcaagaaccaccgcgagctatgtgattaatggcaaagcgaagcagtaccgcgtaagcgataaaacggtcgaaaaagtgatggctgtggtgcgagagcacaactatcacccaaatgcggtcgctgctggcctgcgtgcaggacgcacacgctctatcggtctggtgatcccggatctggaaaacaccagctatacccggattgcaaattatctcgaacgtcaggcgcgtcagcgcggctatcagctgctgattgcctgctcggaggatcagcccgataacgagatgcgctgcatcgagcatctgctgcagcgccaggtggacgctatcattgtctctacttcgctgccgccggagcatcctttttatcagcgctgggctaacgacccgtttccgattgtcgccctcgaccgcgccctcgatcgcgagcacttcaccagcgtggttggcgctgaccgggatgacgccgagatgctcgcagctgagctgcggacgtttcctggcgaaacggtgctctatctcggcgcgctgccggagctgtcggtgagcttcctgcgcgaacagggcttccgtaaagcctggcaggacgatccgcgtgaggtgcattatctctatgccaacagctatgagcgcgaagcggcggcccagctgtttgagaaatggcttgaaacccatccgatgccacaggcgctgtttaccacctctttcccgctgctgcagggcgtaatggatgtgaccttgcgtcgcgagggtaaactgccctccgagctggcgatcgccaccttcggtgataatgagctgctcgattttctgcagtgtccggtactggccgtggcccagcgtcatcgcgatgtcgctgagcgggtgctggagattgtcctcgccagcctcgacgaacctcgcaagccgaagccgggtcttagccgtattcgccgtaatctctatcgtcgcggtagcctgaatcgccgctaagggcgccatatcgccagcgcccaggtattaacctggcaggcctgaccgtaagcaggccgctggcgataaatcaggcaattgacgtgcaaaatgcaaaactgaatatatttcagacaaatccctaaacttctttacgcgttattttattttattcactgaccatcgttttgtgactccaaatggggtacaaaaaatgactgcgcggactttaattgtattattttgttacattcatcaggttaattgctgaattaacactcattttgtacgcgccacgctttcttccccgtcatatcccgcgcctggccagtccctctgccagcaacaggtactgttaacggccggcataatggcctaaaatgccgctcgcgtcgcaaactgacactttatattttcccgccgaagatattctgttgtttataactgttacgagtttgttggttattttcttacacgtattcataacgttaatttgcctcgcctgttgatgattttttcatcagggctaatgtcggctgtaaataatgggtttttgagctccgttggcatccgtgctggcttgacaagcttttcctccgctccgtaaactccttctggtgggaatttgtggggtaaagtggcgaaaaggggtgaggctggcatgttccgtggagcaacgttagtcaatctcgacagcaaaggccgcctggccgtgccaacgcgctatcgcgaagggctgatcgaggacgctgccggtcaattggtatgcaccattgacattcatcacccgtgcctgctgctttatccattgcctgaatgggaagtcatcgagcagaaattgtcgcgtttatcgagcatgaatcccgttgagcggcgcgtacagcgtttgcttttgggtcatgccagcgaatgtcagatggataatgccggccgcttgctgattgcgccggtgttacggcagcatgccgggctgacaaaagaagtgatgctggtcgggcagtttaataaatttgaactgtgggatgaaacgacctggtatcaacgggtcaaggaagatatcgacgctgagcagtccgcgaccggtgaactgtcggagcgcctgcaggatttgtccttataaaaatgatggaaaattataaacatactacggtacttctggatgaagccgtcaacggcctcaatattcgtccagacggtatctatattgatggtacttttggccgcggtggtcactcgcgcctgatcctctcccggctgggtgcggaaggacgcttgctggccatcgatcgcgacccgcaggcgattgccgtcgcgcaaaccatcgatgacccccgcttttccatcgtacatggtcccttttcacaactcgctgagtacgtcggcgagcgcaatcttaccggtaagatcgacggcattctgctcgatctcggcgtctcttccccgcagcttgacgatgcggaacgcggcttttcctttatgcgtgacgggccgctggatatgcgcatggatccgacgcgcggtcagtccgcggccgaatggctgcagacggctgaagaagacgatatcgcctgggtgattaaaacctttggcgaagagcgtttcggcaaacgtatcgcccgcgcgatcgtcgaacgtaatcgcattcagccgatgacccgtaccaaagagctggcggaagtcatcgccgcggcgatgccggtaaaagataagcacaaacatcccgcgacccgtaccttccaggcggtgcgcatatgggtaaacagtgaactggaggagatagagcaggcgctaaaaagctcgctcagcgtgctggccccgggcgggcggctgtcgatcattagttttcattcgctggaagatcgcattgtgaagcgctttatgcgtgagcaaagccgcggtccgcaggttccggcgggaataccgatgaccgaagcgcagctcaaaaaactgggcggccgtgagttgcgagcactaggcaagttgatgccgggcgaagaagaggtggcagagaatccacgcgcccgtagttcagtgctgcgtatcgcagagaggacgaacgcatgatcggcagagtgacagaggccttaagcaaggttaaagggtcgattggaagcaacgagcgccatgctttgcctggcgtgatcggggacgaccttctgcggtttgggaaactgccactctgcctgttcatttgcatcattattacggcgattaccgtggtcaccactgcgcatcacacgcgcctgttgaccgcgcagcgtgaacagctggttctggagcgcgacgccctggatattgagtggcgcaacctgatcctcgaagagaacgcgctcggcgatcacagtcgggttgagcggatcgcgaccgagaagttacagatgcaacacgtcgatccatcacaagaaaatatcgttgtacagaaataaggattattgcgacggatgaaagcagcgccaaaaacgcctaaagcaaaacgtcaggaagaacaggccaactttatcagttggcgttttgcgttgctgtgcggctgtattctgctggcgctggcttttctgctgggtcgcgtcgcctggctacaggtgatcagccccgatatgctggtgcgccagggcgatatgcgttctctgcgcgtacaggaagtgtccaccgcgcgcgggatgattaccgatcgctccggacgtccgctggcggtcagcgtgccggtgaaggctatctgggccgacccgaaagagctccatgacgccggcggggttaccctggatacgcgctggaaagcgctggcggatgccctcaatatgccgctggatcagctggcgacgcgcatcaataccaatccgcggatgcggtttatctatctggcgcgtcaggttaaccctgacatggccgattacatcaagaagctgaagctgccgggcattcatctgcgtgaagaatcccgtcggtactacccttccggggaagtaaccgctcacctcatcggctttaccaacgtcgatagccaggggattgaaggggttgaaaaaagctttgataaatggcttaccggtcagccgggcgagcgtatcgtgcgtaaagaccgctatggccgggtaattgaagacatctcttctaccgatagccaggcagcgcacaacctggcgctgagtatcgacgaacgcctgcaggcgctggtctatcgcgagctaaacaacgccgtggcctttaacaaagccgagtcgggcagcgccgtgttagtagatgttaacaccggtgaagtgctggcgatggccaacagcccatcctataacccgaacaacttcgccggtacggcaaaagacaccatgcgtaaccgtgcgattaccgacgtgtttgagccgggttcgacggtgaaaccgatggtggtcatgacggcgctgcagcgcggtatcgtcaacgaaaataccgtgctcaataccgtgccttatcgaattaacggccacgaaatcaaagacgtggcgcgctacagcgaattgaccctgaccggggtgctacagaagtcgagtaacgtcggtgtttctaagctggcgttagcgatgccgtcctcagcgttagtagatacttactcacgttttgggcttggaaaggcgaccaatttggggttggtcggagaacgcagtggcttatatcctcaaaaacaacggtggtctgacatagagagggccaccttttctttcggctatgggctaatggtaaccccgttacagttagcgcgagtctacgcaacgattggcagctatggcatctatcgcccgttgtcgattaccaaagttgatcctccggttccgggcgagcgcgtcttcccggaatcactcgttcgtaccgtcgttcatatgatggaaagcgtggcgctgcccggcggcggcggtgtgaaagcggcgatcaaaggctatcgcatcgcgattaaaaccggtacggcgaaaaaagtggggccggatggccgctatatcaacaaatatattgcttacaccgcaggcgttgcgcccgccagccatccgcgcttcgcgctggtggtggtgatcaacgacccgcaggcaggtaaatactacggtggcgccgtttccgcgccggtcttcggtgccatcatgggcggcgtattgcgcaccatgaacatcgagccggatgcgctggcaacgggcgaaaaaagtgaatttgtaattaatcaaggcgagggaacaggtggcagatcgtaatttgcgcgacctactcgctccatgggtgccaaacgcaccggagcgcattctgcgagagatgacgctggacagccgggtggctgcttccggcgatctctttatcgcggtacagggtcatcaggcggacgggcgtcgttatatcccgcaggcgatagcgcaaggtgtggctgccattattgctgaagcgcagggcgaagctaaagacggtgagatccgtgaaatgcacggcgtgccggttatctacctgagccagcttaacgaacgcttatcggcgctggccgggcgtttttatcatcagccgtcgcagcagctgcgtctggtgggcgtcaccggcaccaacgggaaaaccaccaccactcagctgctggcgcagtgggcaaagctgctcggcgaaaccagcgcggtgatggggaccgtcggtaacggtctgctggataaagtcgttccaactgaaaacaccaccggttccgcggtggacgttcaacatgtgctctccagtctggtcgggcagggggctaccttcggcgcgatggaagtctcctcccatggtctggtacagcaccgcgtagcggccctgcagtttgccgcctcggtgtttaccaatctcagccgcgatcatctcgactaccatggcgacatggagcactacgaagcggcgaaatggctgctgtactccacccatcattgcggtcaggccatcgtcaatgctgacgatgaagtcggtcgtcgctggctggcaaaactgccggacgcggtggcggtatcgatggaagatcatatcaacccgaattgccacggccgctggctaaaggccaccgcggtgaactatcacgacagcggggcgaccatccagtttgactccagctggggcaagggcgaaatcgaaagccgcctgatgggcgcctttaacgtcagcaatctgctgctggcgctggccacgctgctggcgctgggctatccgctggccgatctgctgaagagcgcagcgcgtttacagccggtgtgcggccgtatggaagtgttcagcgcgccgggtaaacctgccgtggtggtggattatgcccatacgcctgacgcgctggaaaaagcgctgcaggcggcacgcctgcactgcagcggcaagctgtggtgcgtcttcggctgcggcggcgaccgcgacaaaggtaaacgtccgttgatgggcgctatcgcggaagaatttgccgacatcgtggtcgtgactgacgataacccgcgcaccgaagagccgcgggcgattatcaacgatattctggccggcatgctcgatgcaggtcaggcgaaggtgatggaaggccgcgcggaagcggtgaccaacgccgtgatgcaggcgaaagagaacgacgtggtgctggtggcgggtaaaggccatgaagattaccagatcgtcggcaaccgccgtctggattattccgaccgcgtgaccgtcgcgcgtctgctgggagcggtagcatgattcgctttacgttaagtcaacttgccgcgatcgcccatggcgaacggcagggtagcgatgtcgctatcgacgaggtgaccaccgatacccgtaaagtgacggcgggctgcctgtttgtggcgctgaaaggggagcgtttcgacgcccatgattttgccgaacaggcgaaagcggcgggcgccggcgcgctgctggtgagtcgtccgctggcctgcgatctcccgcaggtgattgtgaacgatacccggcaggctttcggtgagttagccgcctgggtgcgtcagcatgtgccgactcgcgtcgtcgccctgaccggctcgtccggtaaaacctcggttaaagagatgaccgcggcgatcctcagccagtgcggcaacacgctgtataccgccggcaacctgaacaacgatatcggcgtcccgatgacgctactgcggctgaccaaagagcatcagtacgcggtgatcgaactcggcgccaaccaccagggcgaaatcgcctggaccgtcagcctgacgcgtccggaagcggcgctggtcaacaaccttgctgcggcgcacctggaaggtttcggttcgctggcgggcgtggcgaaggcgaagggcgaaatctataccggtctgccggaaaatggcatcgccatcctcaatgccgacaataacgactggctgaactggcaggcggtgattggcgatcgcaaagtgtggcgcttctcgccgaacgcggcgaacagcgatttcacggcgaccaacgtgcagatcactagccacggcaccgaatttacgctgcagaccccaaccggcaacgttgacgtactgctgccgctgccgggacgccacaacatcgctaatgcgctggccgccacttcgctggcgatggcggtaggcgccgatttggcggcggtgaaagccggactggcgcagctgcaggccgttccgggacgtctgttcccgatccggctgaccgagagccagctgctgctggatgattcctataacgctaacgttggttcgatgaccgcggcggtgcaggtgctgtcagagatgcccggctttcgcacgatggtggtcggcgatatggcagagcttggcgcggagagcgcggcctgccatcgcgaagtcggcgaagcggcgaaagcggcgggtctggattgcgtcctcagcgtcggtgccttgagcgcggatatcagccgcgccagcggcgtgggcgaacattttaacgataaagccgccgtggtggctcgcctgcgcgagctgctggcggagcacaaaataatgaccattttagtgaagggttcacgtagtgccgccatggaagaggtagtacgcgcattacaggagactgggacatgttagtatggctggccgaacacttggtcaaatattattccggctttaacgtcttttcatatctgacgtttcgcgccatcgtcagcctgctgaccgcgctgttcatctcgttgtggatgggcccgcgcatgatcgcccgtctgcaaaaactcgcctttggccaggtcgtacgtaacgacggcccggagtctcatttcagtaaacgcggtactccgaccatgggcgggatcatgatcctcaccgcgatcaccgtttccgttctgctgtgggcctatccatctaacccgtacgtctggtgcgtactgacggtattaatcggctacggcatcatcggtttcgttgatgattaccgtaaagtcgtgcgcaaagataccaaaggcctgatcgcccgctggaagtatttctggatgtcggtgatcgccctgggcgtggccttcgcgctgtatctggcggggaaagataccccggcaaccgagctggtggtgccgttctttaaagacgtaatgccgcagctggggctgttctatatcttgctggcctacttcgttatcgtcggtaccggcaacgccgtcaacctgaccgacggcctcgacggcctggcgattatgccgaccgttttcgtcgcggcaggctttgcgctggtggcatgggccaccggcaacatgaattttgccaactacctgcatatcccgtatctgcgccacgctggcgagctggtgatcgtctgtacggcgattgtcggggcggggctgggcttcctgtggttcaacacctacccggcgcaagtctttatgggcgacgtcggttcactggcgctcggcggcgcgttgggcattatcgccgtgctgctgcgtcaggagttcctgctggtgatcatgggcggggttttcgtggtggaaacgctgtcggttattctgcaggtcggctcctttaagctgcgcggtcagcgcatcttccgcatggcgccgatccaccaccactatgaactgaaaggctggccggagccgcgcgttatcgtgcgcttctggattatttcgctgatgctggtgctgattggcctggcgacgctgaaggtacgttaatcatggcagattatcagggtaaaaaagtcgtcattattgggctgggtatgaccggcctgtcatgcgtggactttttcatggcgcgcggcgtaaccccgcgcgtgatggacacccgcgtcgcgcctccggggctggataaattacccgaatcggtcgaatgccatgtcggcggactcaatgatacctggctgctggcggcggacctgattgtcgccagtccggggattgcgctggcccatccttcgctcagcgcagcggccgacgctggcgtagagatcgttggcgatatcgaactgttctgccgcgaagcgcaggcgccgattatcgccattaccggttctaacggcaaaagcactgttactaccctggtgggcgagatggcgaaagccgctggagttaacgtcggcgtgggcggcaatatcggcctgccggcgctgatgctgctggacaccgatcgagagctgtatgtgctggagctctccagcttccagctggaaaccacctccagcctgcaggcggtggcggcaaccatcctcaacgtgactgaggaccatatggaccgctacccgctggggctgcagcagtatcgcgcggcgaagctgcggatttacgagaatgcgaagacctgcgtggtgaacgcggacgatgcgctcaccatgccggtacgcggggcggacgaacgctgcattagctttggcgtcgatgtcggtgactaccaccttaaccgccagcagggcgaaacctggctgcgcgttaaaggtgagaaagtcctcaatgtgaaagagatgcctctcaccggtcagcataactacagcaacgccctggcggcgctggcgctggccgatgccgcgggtctgccgcgggccagcagcctgaaggcgctgaccacctttaccggtctggcgcaccgtttccagctggtgctggatcacaacggcgtacgctggattaacgactcgaaggcgaccaacgtcggcagcaccgaggcggcgctgaacggcctgcagctggacggcacgctctatctgctgctgggcggcgacggcaagtccgctgattttaccccgctgaagcgctacctcggcggcgatcgtattcgcctgtactgctttggtcgcgatggcgccgagctcgctgagctgcgtcctgaggtggcggtacaaactgagactatggaacaggcgatgcgtcagattgctcccctggtgaaagcgggggacatggttctcctgtcgccggcctgcgctagcctggatcagtttaagaactttgaacaacggggcgagatgtttgcccgtctggcgaaggagttaggttgatgcgtttctctctcccacgcctgagaatgccgcagctgagcctgcctcggctgagactgccgcgattgccggggatgtttattttcgcctggctattcgctgcgctgaaaggctgggtgatgggctcgcgcccgaaagataacgacagtctggtgatgtatgaccggatgctgctatggctgaccttcggcctggcggcgatcggctttattatggtgacctcggcgtcgatgccggtcggacagcgcctggcgaacgatcctttcctcttcgccaagcgtgacggcctgtacattgtgctggccttcgcgctggcgatgattacgctacgtctgccgatggatttctggcagcgccacagtaccgcgatgctgatcgcctcgatcgtcatgctgctgatcgtactggtagtaggcagctcggtaaacggcgcatcgcgctggatagcccttggtccgctgcgtattcagccggcggagttcaccaagctgtcgctgttctgctacatcgccaactatctggtgcgtaaagccgacgaagtgcgtaacaacctgcgcggcttcttaaaaccgatgggcgtgattttcgtactggccatcctgctgctggcgcagcctgacctcggtaccgtggtggtcctgttcgtcaccacgctggcgatgctgtttctcgccggcgcgaagctgtggcagttcatcgccattatcggcatgggtatttcggcggtggtcctgctgatcctcgccgaaccataccgtattcgccgcgtgacctccttctggaacccgtgggaagacccgttcggcagcggctaccagctgacccagtcgctgatggctttcggccgcggcgagatgtgggggcagggcctcggcaactcggtgcaaaaactggagtatttaccggaagcgcacactgactttatcttcgccattatcggcgaagaactcggttatatcggtgtggtactggcgcttttaatggtattcttcgtcgctttccgcgccatgtcgattggccgtaaagcgctggagatcgatcatcgcttttccggcttcctcgcctgtgcgattggtatctggtttagcttccaggcgttagttaacgtcggcgcggcggcggggatgctgccgacgaaaggtctgacgctgccgctgatcagttatggtggttccagtctgttgattatgtcgacggccattatgttgttgttgcgaattgattatgaaacgcgtctggaaaaagcccaggcgtttacacggggtgtgcgatgagcggtcaggaaaagcggttgatggtgatggcgggcggtaccggcgggcatgtgttcccgggactggcggtcgcgcaccatttaatggaccagggctggcaggttcgctggctgggtaccgccgatcgtatggaagcggatttagtgccgaaaaacggcatcgaaattgattttatccgcatctccggcctgcgtggcaaaggtatcaaagcgcagctactggcgccggtgcgtatttttaacgcctggcgtcaggcgcgggcgatcatgaagcgtttccagccggacgtggtgctgggtatgggcggctatgtttccgggcctggcggtctggcggcgtggtcgctggggatcccggtggtcctccacgagcaaaacggcattgccggcctgactaacaagtggctggcgaagattgcgaagaaagtgatgcaggcgtttcccggcgcgttcccgcatgcggacgtcgttgggaacccggtgcgcaccgatgtactggcgctgccgctgccaggtcagcgtctggttggccgtcaggggccgattcgcgtgctggtggtcggtggctctcagggcgcgcgcgtcctgaaccagacgatgccgcaggtggcggcgaagctcggcgctacggtgaccatctggcatcaaagcggcaaaggcggccagcaaaccgtgcagcaggcctatgccgccgccggacagccgcagcataaagtgacggaatttattgatgacatggccgcggcgtatgcctgggcagatgttgtggtttgccgttccggcgcgctgacggttagcgaaatcgcggccgcaggtttaccagcgctgtttgtcccgttccagcacaaagatcgtcagcagtactggaatgcgctgccgctggagaaagccggcgcggcgaaaattcttgaacagcctgagttcacggtagaggcggttgcctctaccctggcgagctgggatcgggaaaccttgctggatatggcggaacgagcgcgtggcgcttcgattccggacgctaccgagcgggtagcagaagaggtcagcgccgtagctttggcgcgctaattgcggtgattttcaccgcccgaatacagaagttgatggcgtaaagaatgaatacacaagatttggcaaaactgcgttccatagtgcccgagatgcgtcgcgttcggcacattcactttgtcggcatcggcggtgccggtatgggcggtattgccgaagtgttggctaacgaaggttaccagatcagcggctccgacctggcgccgaatccggtgacccagcagctgtcgcagcttggcgccaccatttatttcaaccatcgcccggaaaacgtgcgtgatgccagcgtggttgtcgtttccagcgcgatttcggcagataacccggaaatcgttgccgcgcatgaggcgcgtatcccggtgatccgtcgtgccgaaatgctggcggaacttatgcgctttcgccacgggatcgccattgccgggacccacggcaaaaccaccaccaccgcgatggtatccagcatttacgccgaggccgggctggacccgaccttcgtcaacggcggactggtaaaagcggcgggcgtacatgcccgtcttggccatagccgttacctgatcgcggaagcggatgagagcgacgcgtcgtttctgcatctgcagccgatggtggccattgtcaccaacatcgaagccgatcacatggatacctaccatggcgactttgagaatctgaagcagacctttatcaacttcctgcacaacctgccgttctacggacgcgcggtgatgtgcgtggacgatccggtgatccgggaattgctgccgcgcgttggccggcagatcaccacctatggttttagcgacgacgccgacgtgcgcgtcgaggactatcgtcaggttggggcgcaggggcatttccgcctggtacgccaggataaagcgatcctgcaggtgacgctcaatgccccgggacgccataacgcgctgaacgcggcggcggccgtcgccgtggcgacggaagaggggattgacgatcgggctattctgcgcgcactggagagcttccagggaacaggacgccgctttgattttcttggcgagtttccgctggccgaagtcaacggcaaaccgggcagcgcgatgctgatcgatgattacggtcaccacccgacggaagtggacgccaccattaaagcagcgcgcgccggctggccggataaaaacctggtgatggtattccagccgcaccgttatacccgtacccgcgatctgtatgatgattttgccaacgtgctgacccaggtggatgccctgctgatgctggacgtctatccggcgggcgaagcgccgatcccgggcgccgacagccgctcgctgtgccgcaccattcgcggccgcgggaaagtggatccgatcctggtgcccgattcggcccaggccgcggagatgctggcgtcagtcctgaccggcaacgatttagtactggtgcagggcgccggtaacatcggtaaaatcgcccgccacctggctgaaatcaaactgatcccgcaaaaaacggaggaggagcgccatggctgataaaatcgcggtgcttttcggtggaacctccgctgaacgtgaagtgtcgctgaattcaggcgcggcggtgctggccgggctgcgtgaaggcggggtggacgcccatccggtcgacccgcgcgatgttgatattacccagctaaaaaagcagggctttaagaaagcgtttattgccctccacggccgcggcggggaagatggcactctgcaggggctgctggagttaatccagctgccttataccggcagcggcgtgatggcttcggcgatttcaatggataaactgcgcagcaagtggctgtggcagggcgccggattaccggtcgcgccgtgggtggcgctgacccgcgcccagtttgccgccgggctgtctactgacgtcgaacagcaaattgcggcgctgggtctgccggtcatcatcaagccgagccgtgaaggctccagcgtcgggatgtcgaaagtcagcgaaagttgtgatttagcgagtgcattggcgttggcttttcagcatgatgatgaagttttggtcgaaaaatggctcagtggaccggaatttaccgtcgccatagtcggtgaagaaattttaccgtcaatacgtatccaggccgcgggaaccttctatgattatgaggcgaagtatctctctgatgagacgcaatatttctgcccaggatttgaagatcccgcgcgtgagtcagctattcagaacctggtgcttaaagcctggaatgttctgggttgcaaaggctggggccgtattgacgtgatgctggacagcgatggccagttttatctgctggaagcgaatacttccccgggcatgaccagccatagccttgtgccaatggcggcgcgtcaggcaggaatgagcttctcccagcttgttgtacgaattctggacctggcggggtgatatgtcgcaggctgcgctgaatacgcggaaccatgaagaagaggcttcttcttcgcgtcggagtaatggaacgcggctggcagggatcgttttcctgctcgcggtgctgtttaccgtgctggtcagcgggtggatggttcttggctggatggaagatgcgcagcgcttaccgctgtcgaagatggtggtgaccggcgagcgccactatacgcgcaatgatgacatccgtcaggcgatcctggcgctgggttcgccgggtacctttatgactcaggatgtgaacatcatccagagccagattgaacgtctgccgtggattaagcaggcgagcgtccgaaagcagtggcccgatgaattgaagattcatctggttgaatatgtgccgattgcgcgctggaatgatcaacatatggtggatgcagaaggaaatgccttcagcgtgccggcggatcgcaccagcaaacagaatttaccgatgttatacggtcccgaaggcagcgagaacgaagtgctgcaggggtatcgtgacatggggcaggtgctggcaaaggataaattcacgttgaaagtggcggcgatgaccgcccgtcgctcctggcagttgacgcttaataatgacatcaagctcaaccttggccgtggcgataccatgaaacggcttcagcgctttatggaactctacccggttcttcagcagcaggcgcagaccgacggcaaacggattagctacgttgatttgcgttatgactcgggtgcggcagtgggctgggtacctgctcccgcagaggaaactaatcaacaacagaatcaggcacaggcagaacaacaatgatcaaggcgacggacagaaaactggtagttggactggagattggcaccgccaaggtggccgctttagtaggggaagttctgcccgacggcatgatcaatatcatcggcgtgggcagttgcccatcgcgtggtatggataaaggcggtgtgaacgacctcgagtcggtggtgaaatgcgtacagcgcgccatcgaccaggccgaactgatggcggattgccagatttcatcagtttatttggcactttcgggtaaacatataagctgtcagaatgaaatcgggatggtaccgatttcggaagaagaagtgacgcaggacgacgtcgagaacgtggtccacaccgcgaagtcggttcgcgttcgcgatgaacatcgtgtcctgcacgtgattccgcaggaatatgctatcgactaccaggaagggattaaaaacccggtagggctgtccggcgtgcgtatgcaggcgaaggtgcatctgatcacctgccataacgatatggcaaaaaacattgttaaagcagtggaacgttgtggtctgaaagttgaccaacttattttcgccgggttagcggccagttattcggtattaacagaagacgaacgtgagctgggcgtctgcgttgtggatatcggcggtggtacaatggatatcgccgtctacaccggcggcgcattgcgtcacaccaaagtgatcccgtatgccggcaacgtggtgaccagcgatatcgcctatgccttcggtacgccgccgagcgatgccgaagcgattaaggttcgtcacggatgcgcattgggttccatcgtcggtaaagacgaaaacgtcgaagtaccgagcgttggtggacgtcctccgcgtagcctgcagcgtcagacgttggcagaggtgattgaaccgcgctataccgagctgcttaacctggtcaatgaagagatcctgcagctgcaggaacagctccgccagcagggtgttaaacatcatctggcggcggggattgtgttaaccggcggcgcggcgcaaattgaaggtctggcggcctgtgcgcagcgcgtgttccatactcaggtgcgcattggcgcgccgctgaacatcaccggtttaaccgactatgcccaggagccgtattattcaacggcggtggggctgctgcactacgggaaagagtcacatctcagtggtgaagcggaagtagaaaaacgcgtgacggcctcagtgggctcgtggattaagcgactcaacagctggctgcgaaaagagttttaattttttaagagaacgcagacaattagcgttctcaggcgacaggcacaagacggagagaaactatgtttgaacctatggaactgaccaacgacgcggtgattaaagtcatcggcgtcggtggcggcggcggtaacgccgttgaacacatggtgcgcgagcgcattgagggtgttgaattcttcgcggtaaacaccgatgcgcaggcgctgcgtaagacggcggttggccagactatccagatcggtagcggtattaccaaaggtctgggcgcgggcgcgaacccggaagtcggccgtaacgcggctgatgaagaccgtgaagcgctgcgcgcagcccttgatggcgcagacatggtgttcatcgcggcaggcatgggcggcggtaccggtaccggcgcggcgcccgtagtcgcggaagtggcgaaggatctggggatcctcaccgttgcggtggtcactaagccgtttaattttgaaggtaagaagcgcatggcgttcgctgagcaggggatcaccgagctgtccaagcacgttgactcactgatcaccatcccgaacgacaagctgctgaaggtcctgggtcgtggaatttccctgctcgacgcattcggcgcggcaaacgacgtcctgaaaggcgcggtgcagggtatcgccgaactgatcacccgtccgggtctgatgaacgtcgacttcgcggacgtccgtaccgtgatgtctgaaatgggctacgcgatgatgggctccggggtggcgagcggtgaagaccgtgcggaagaagcggctgaaatggctatctcttctccgctgctggaagatatcgacctgtcaggcgcgcgcggcgtgctggtcaacattactgcgggcttcgacctgcgtctggacgagttcgaaactgtgggtaacaccatccgtgcttttgcctcggataatgcgaccgtggttatcggtacctctctggacccggatatgaacgacgagctgcgcgtgaccgtagtggcgaccggtattggcatggataagcgtccggaaatcaccctggtaaccaacaagcaggttcagcagccggtgatggatcgttaccagcagcatggtatgtcgccgctgacgcaagagcagaagccggcagccaaagtggtgaacgacaatacgccgcaaaccgcgaaagagccggattatctggatatcccagccttcctgcgtaagcaagccgattaagaatcgactggaagttgggcatctgcgctctttgtgctaaactggcctcccgatagtggtgtacacttcggttggataggtaaattggcgagattatacgatgatcaaacaaaggactcttaaacgtatcgttcaggcgactggcgtcggtttgcataccggcaagaaagtcacactgacgttacgccctgcgccggcaaataccggggtcatctatcgtcgcaccgacttgaatccaccggtagattttccggctgatgccaaatctgtgcgtgataccatgctctgtacttgcctggttaatgagcatgacgtgcggatttctacggttgaacacctgaacgccgcattggctggcctgggtatcgacaacattattgttgaagtcgatgcgccggaaatcccgattatggacggcagtgcggctccgttcgtttatctgttgctggacgccggcattgatgaactgaactgcgccaagaaatttgtacgtatcaaagagacggttcgcgttgaagatggcgacaaatgggctgaattcaaaccgtacaatggtttttcgctggacttcaccatcgattttaaccatccagcgattgatgccagcacccagcgctatacgctgaacttctcggccgatgcgttcatgcgtcagattagccgtgcgcgtaccttcggttttatgcgcgatatcgaatatctgcagtcccgcggcctgtgcctgggcggcagcttcgattgtgccatcgttgttgacgattatcgcgtactgaacgaagacggtctgcgctttgaagacgaatttgttcgccacaaaatgctggatgcgatcggtgacctgtttatgtgtggtcacaacattatcggcgcattcacggcgtacaaatcgggtcacgcgttgaacaacaaactgctgcaggcggttctggcaaaacaggaagcctgggagtatgtgaccttcgaagacgacgcaaaactgccaatggcgttccgcgcaccgtcgatggttctggcgtaagcctgaccattcagtaaattcgactggtaacctggtactctctccgaccagggagccagtcgtttttcttttatagcaccctccagttattttcgctgcgatccctggataataattagcgtgcgttcgctgctttattaagcgttttcgccgggcaatcgccttcattcatgctgcctcaggccggtattaatgttagtatttgagcgcaaaattatttctcagggttgctttaccccgtggacatcaggttgtcctgcgaaaaacatcaataaagagacagcctgaacgacgacgggtctagcaaagaaaggtaatgaacgtgagtggattgctgacgcgctggcgacagtttggcagacggtatttttggccgcatctcctgttggggatggtcgcggccagcctcggcctgcctgcgttaagcaacggtcacgagaccgcggcgccagcgaaggcgaccgccagcaatcacaatccgagcaaggttaatttctctcagctggcgctgctggagacgaatcgccggcccagctttaccgtcgactactggcatcagcacgccattcgcaccgttattcgtcatctctccttcgccatggcgccgcaggcgctgccggtggcggaagaaacttccccgctgcaggctcagcatctggcgctgctcgacaccctcagcgcgctgctgacgcaggacagcacgccgccggtggtgatccgccaggcgggttacatcccttcttcatattctgccttccgcgtcagcgcctggataagccaggtggcggggatccgcgcagggcctcaacgtctcagctgaaaataaccacggaccatcctattttttgtgactccgcaccgcggggcgtttgagattttattatgcttatcaaaatgttaaccaaggttttcggcagccgtaacgaccgtacgctgcgtcgtatgcgcaaagtcgtcaatatcatcaacggcatggaaccggcgatggaaaaactctctgatgacgagctgaaagcgaaaaccgctgaattccgcgcgcgcctggaaaaaggcgaaacgctggaaagcctgatccctgaagctttcgccgtcgttcgcgaagccagtaagcgcgtattcggcatgcgccacttcgacgtccagctgctgggcggtatggtgcttaacgatcgctgcatcgccgagatgcgtaccggtgaaggtaaaaccctgaccgcgaccctgccggcgtacctcaacgcgctaaccggcaaaggcgttcacgtagtgaccgtcaacgactatctggcccagcgtgacgccgaaaataaccgcccgctgtttgaattcctgggcatgacagttggcatcaacatgtccggcctgccggcgccggcgaagcgtgaagcttacgctgccgatatcacctatggcaccaacaacgaatacggcttcgactacctgcgcgacaacatggccttcagcccggaagagcgcgttcagcgtaaattgcactatgcgctggtggatgaggtggactccatcctgatcgatgaggcgcgtacgccgctgatcatttccggcccggcggaagacagctctgaaatgtaccgcaaggtaaacaaaatcatcccgcatctgatccgccaggaaaaagaggattcggatactttcactggcgaaggccacttctcggtggatgaaaaagcgcgtcaggttaacctgaccgaacgtggtctggtgctgattgaagagctgctggtacaggaaggtattatggatgaaggtgagtccctgtactctccaaccaacattatgctgatgcaccacgttaccgccgcgctgcgcgcccatgcgctgttcacccgcgacgttgactacattgtcaaagatggcgaagttatcatcgtcgatgagcacactggccgtacgatgcagggccgccgctggtccgatggtctgcaccaggccgttgaggccaaagagggcgtggagatccaaaacgagaaccagactctggcctctatcaccttccagaactacttccgtctgtacgagaagctggcggggatgaccggtacagccgataccgaagcctttgaattcagctctatctataagctggataccgtggttgtaccgaccaaccgtccgatgatccgtaaagacatggcggatctggtctatatgaccgaagcggaaaaaattcaggctattatcgaagatatcaaaactcgtaccgctgccggtcagccggtgctggtggggactatctcgatcgaaaaatctgaagtggtttcccgcgaactgactaaagctggcatcaagcacaacgtcctgaacgccaaattccacgccagcgaggcggatatcgtcgcccaggcgggctacccttccgcggtgaccatcgctaccaacatggcgggtcgtggtaccgatattatgctcggcggtagctggcaggcggaagtcgctgcgctggaaaacccaacgccagagcagattgagaaaatcaaagccgactggcaggtacgccacgatgcggtactggccgcaggcggtctgcacatcatcggtaccgagcgtcatgaatctcgccgtatcgataaccagctgcgcggccgtgctggtcgtcagggggatgccggttcttcccgcttctacctgtcaatggaagatgccctgatgcgtatcttcgcctccgatcgcgtgtctggcatgatgcgtaaactgggaatgaaaccaggtgaggcgattgagcacccgtgggtcaccaaggcgatcgccaacgcccagcgtaaagtggaaagccgtaacttcgatatccgtaagcagctgctggaatatgatgatgtggccaacgaccagcgccgggcgatctacacccagcgtaacgagctgctggacgtgtctgacgtcagcgaaaccatcaacagcatccgcgaagacgtctttaaggcgacgatcgatgcccatattccgccgcagtcgctggaggagatgtgggatatcgaaggtctgcaggagcgtctgaaaaacgacttcgacctcgacctgccaatcaaagagtggctggataaagagccggagctgcatgaagagaccctgcgcgaacgtattctgcagagcgcggtagaaacctaccagcgtaaagaagaagtggtcggcgccgagatgatgcgccacttcgagaaaggcgtgatgctgcagactctggattcgctgtggaaagagcacctggcggcgatggattacctgcgccagggtatccacctgcgcggctatgcgcagaaagatccgaagcaggagtacaagcgcgaatcgttctcaatgtttgccgcgatgctggagtcactgaagtatgaagtgatcagcaccctgagcaaagtccaggtgcggatgccggaagaagtcgaggcgatggaacagcagcgtcgtgaagaggccgagcgcctggcgcagatgcagcagctcagccatcagagcgatgatgaagccgcagcccaggatctggcggcgcaaaccggcgaacgtaaagtgggccgtaacgatccgtgcccgtgcggctccggcaaaaagtacaaacagtgccacggccgtctgagctaaggtctgataaaacaaacaaaggcgcagagttctgcgccttttttatggagcgcattcaatgaaaaaactgcaaatcgccgtcgggataattcgcaatccgcaaggcgaaatctttattacccagcgcgccgccgatgcccatatggcgaataagctggagttcccgggcgggaaaattgaatctgatgagacgcctgagcaggcgctaatccgcgaactgcaggaggaggttgggattacggtcaccgcctcttcgctctttgataagctggagtatcagttccccgatcgccatattacgctgtggtttttcctcgtggaaagttggcaaggcgagccgtggggtaaagaagggcagccgggtcggtggatggcgggaccaacgttggatccggcggcgtttcctccggcgaatgaaccggttatcagcaaacttatcgcccagggctgagccccggggcgcgaggctaacccgccaggcgccgggttagcttgccatcaaatcagggttgctgctcgctccagtcatcgctatcggagagatcccccgcgctggggatgcgcttctcttccgcagcccattctcccagatcgatcagttggcagcgcttgctacagaacggacgaaacggactctgctcgccccacaccacagttttgccgcaggtcgggcagttgacgatagtctcttctgacatgttatctccttaacagcaggccagttcaaaatcaaagcgctccggcacgatcccatattcactgtccagcgccaggaaacggatggcgaaacggctcttatggccggaaatttgcggataaagctggtgagccagatcgagacgcaggcgcagcagatcggcatcttcgccattatcctgataaaagccgttgaggctggtctgtttgcggaacagcgcggagttgcggataagatcgaggatcaggctcagggactggaccagcggatcgaggctggcaagccagctggccacctgctcgtcgcgatgcgcctgtggcatatggagccagatatgcagggtcggtaaatcgaagctgcagcagccgccaggaatactcaggcgctgacgcaccagcgcaatcaggcgatcttcacgcagaaactgaccaatgcgcggcgcggccatcagggtgctggaggactgcttcaactggtggcgcagctcgtttatgcgctcctgatcgacgcccggcacttctgcccatgactggagcttacgctgctggcgttccagctctttaaccaggtcagtgcgcacctcgccgcgctccaggacatccagcagatcgccggcgttacggaaaaaatggagcgcatcggcatggctggcaatctgcggatggaaagccatctgctggatcagaaattcgatgcgcagccaggtgcgcattttctcattaagaggatgttcaaacagaacgggggtatgcattacgagttttcctgtgaggcggcctgcgatgccagcgttaaatacttttcgtgcaggcgggcaacatccgatgccactgcatccggcgtgccagtgttttcaataacatcgtccgcgacggccaggcgctgctggcgcgtggcctgggcggcaagaatatgttcagcatgttcgcggctgaccttatcgcgcagcatggtgcgttcgatttgcgtctctttcggcacatcgacgaccagtacgcgatcggcctggccggacaggcggttttcgaccagcaaaggtacgacccagaggagataaggggaggtggcggcctgcatctggcggcgcgtttcctgctgaatcagcgggtgcaacagcgcattgagccaggctttttcctccacgtgagcaaaaattttttcccgcagcaggcggcggttcagcgtgccgtcgggggcaatcatctgtggtccaaagtggccgacaatggcctggagcgccggggtaccgggctcgaccacctgacgggcgataacatcggcatcgataaccttaaccccaagctgcgcgaaggcgtcggcgaccgtacttttaccgctgccgatcccgcctgttaacgcgactgtgtaccccatatcttctgaccctgaaacggattgctcgtattttttgcaggcagacagcgatgactggcagcgcgccggggaggcgacagtgagcatgtcgtgagggccccgcgccaaccgggatcgccgtccgctatactgtttgttttaatcaagcaaatcaaatggttaaaaacaatactccggcaggggaaggcataggcgcctttttctccattcaccaggtaaatttatacgattgtagcgtaaaaaaagtgaaaatcgcagtcttgcgcgggcctgattcgcgcgtatgataacgtcactggagttgtgctctcacattcatgccattaaccccaggaattcgcacatgcgtattgaagaagatctgaagcttggtttcaaagacgttcttatccgcccgaaacgctctaccctcaaaagccgttctgatgttgagctggaacgtgaattcacctttaaacattcaggcctgacctggtccggcgtgccgattattgcggctaacatggataccgtcggcaccttcagcatggctaaagcgctggccacttttggtattctgaccgcggtacataagcactacaccgctgaagaatggctggcgtttacccagggcgcatccgcagacgtactcaagcatgtgatggtttccaccggcacgtccgatgcggatttcgaaaaaacccagcagatcctctctcagaacccacagctgaattttgtgtgtatcgacgtcgccaacggctactccgagcactttgtacagttcgtggcgaaggcgcgcgaagcctggccgcaaaaaactatcatcgccgggaacgtggtcaccggtgaaatgtgcgaagagctgatcctctccggcgccgatatcgtcaaagttggcatcggcccgggatccgtctgcaccacccgcgttaagaccggggtcggctatccgcagctctccgccgtgattgagtgtgccgatgcggcgcacggccttggcggccagatcatcagcgacggcggttgcaccatgccgggcgatgtggcgaaagccttcggcggcggcgctgatttcgtgatgcttggcggcatgctggcgggccatgaagagagcggcggaaccatcgttgaagagaacggagagaaattcatgctgttctacggcatgagctccgagtcggcgatgacccgccatgtgggcggtgtcgcgaaataccgcgcggcggaaggcaaaaccgttaagctgcctttgcgtggaccagtggagaataccgcacgtgatattctcggcggtctgcgttctgcctgcacctacgttggcgcctcgcgtctgaaagagctgaccaagcgtacgacctttatccgcgttcaggaacaagagaaccgggtattcaatagcctgtaatcggctgcactggcgcctgcgcggcgccagtgtttctcatcctcccgccccgccaatggcatcgcccaggtgaaaaacgggcaaatacattgccaccaccagaatcccgaccagcgagccggttatcaccagcatcattggttcaagatgcgcagccagactatcggctcgctgataggtttgctggcgatggtgatgcgccaggttttccagcatctgatccagcgctcccgcgctttcccccgtgcggatgagctgcaggcacagcggtgtaaaaccgccgcagcggcttaacgcctgccaaatcggctccccctgaacgatcagcgcgcgggcctgcgccagacgctggcgccacagcgggcacgacagggactcttcaacgctttgcagcccctgcagaaagctaataccggcgctttgggttaacgccaggatggtgaagatcaggctcagctgttgtccgccgatcagggagccaatgagagggagcgcgttaagcaaccgctggcggcgcagcaaccagtcgctgcgccgccggatcagctggttgagcagcagcgggctcagcagcgaggccagcagcagcggccagccgcgacttagcatgtcgcctgccgcaacgaccatccgcgtcaatagcggtagcggcgtactgaacgtctggtagatggcggtgaacccgggcaggacaaaatagagcatccccagcaccaccaacagcgccagagagagcacgatcagcgggtagcgcagcgcttttttgactttgctggcgagccgctgctgctcctgctgctgattcgccaactgcaggcagcagatatcgagcttgcccgtcagttcgccggtgctaatcatcgccagatataggggcggaaaagcctggggccactgcgccagcgcggcagagaacgccacgccctgggccagctcgcggcctagcgcctcaagcagcgcctgccactgggcatgcgactgctgctgcgccagcagcgataacccttccgccagcggcaggccggcctgcagcagggtcgccagctggcggatcgtttcgcaactgtagcgcgggtgccagaggctctgcttcaccgcacagcggcgtacagccagcggtataactcgctgctgttggaggtgctgcaggacctccagacgcttggtttgccatagcatcccctgacagggggcgccctgcacatcgataccgcgccagcgccagagacgcttagtcgccatgggggatccccagcacccgcaccacctcttcgaggctggtcaatccctgttcgatagcctgacagccgctttcaaaaagcgtcatcatccctgcggctcgcgccagagattcaatctcaatggcgttaagtccctggactatcccctggcgtagcccgggggtaacaggcagcacttcgaacagcgccagccggccgtaatatccgtggtaacaatgttcgcagcccgctgcctgccagcgtggcagcgggcggggccacaggctgtgcggcaggtcggcggcgctgccggcattacgccgacagtggggacacagcttgcggaccagacgctgggcgatgaccagcgagagcgcagaggaaatcatccagcgggcgatgcccatttgctgcaggcgggtcagggtttcactggtggaattggtgtgcagggtggagagcaccagatgaccggtctgggcggctttgagcgcgatttcagcggtctcggcatcgcggatctcgcccaccatgacaatatccggatcctggcgtaacagggcgcgcagcacactgtgaaaagtgagtccggcgcggggattgatttgcgtctggttcatcccggcgatggggatctccagtggatcctccacgctacagatattcacttgctcacggtttctggcctgcagggcgctgtagagggtcaccgttttcccgcttccggttgggccggtgaccagcagcagaccctgcggctggttcagcgcctggcgaaaggccgccagctgggaggatgagagtccgagtgcttccagatccagcgcctggtcaacctgatgcagaaggcgcaggacaatcttttcgccatagcggcagggcagagtggcgatgcgaaaagagagcggtcgtcccgcaagattcagcgcgaactggccatcctgcggtaaacggtgctcggcgatatcgagactggccaggaccttgagtcgcgcgataaccggtgcggccagttcgggagccagcaacggtagggcgtgaaggacgccatcgacccgcaggcggatgcgtaagtgcgtttccgtgggctcgatatgaatatcagacgcccgctgacgcagggcctgttcgaggatctggttgacccgttcggcgatattttccggcccgtcgttctgcgccagttgcgcctgcttttcctgggcctgcagacgcttatccatctgctcctggctccagcattcaatgtcgatccgcttttgcgtcgcgaagcgtagcgcctccattaactccgccggcggggtattaaccaccgcaatagagattgtctgttcatcgctatgcagcagcatggcgtggtagcgacggcagagggggatcagctgttctgttttcatgcattcgccctcacttcacccggaaaacgtcttcgcaggcctgctgaagcgcgctattgccggtgatggtgcagacgcgctgccagccggtgacgccctcggcattgtcccaggtcggcgtcagggtgacccccagtccgttcagactctcctgaccggtgagggtgacgacccctttggccacgctcatggcggaaaggtagcgcgtggttgtcggcgagggaatgccgttgctgccgccgtcgcatggcgttaggccgccatgatcgagcgcgcaaagttcgatggctgtccggtaagggacaaaggtctgcagcaggtcggtgagggcggctttacgcaggtagttctggtaggccgggatgccgatggcgctaagaatggcgatgattccgataaccaccatcagttcaatcagggtaaaacctcgttgtttatccataagtcgctccttgttgtgacagaagcactgtgaagggattgaggggcgcaggcgagggggcgaaaacgatccgggaaagcgggttccagggtttttatctggatttcatggtgagcacgggcgactgcgaggcgggacgcaaattcaggccttcacgcccggaagcgtgaaggcctgttgctcagcggaagcgcatcgacaggtcgagcgcctgcacatgtttggtcagggcgccgacggaaatatagtcgacgccggtatcggcgaattcgcggatggtgtcaaaggtaacgttgccggagacctccagcgccgcctggcctgcggtaattttcaccgcctcgcgcatcaggtcggtggtgaagttatcgagcataatgatatcggccccggcttttaacgcctgctccagttcatccagggtttccacttccacttccaccggcacatcaggatgcagccagaacgccttttccactgcctgacggatcgatccggaggcgataatgtggttttctttaatcaggaacgcgtcgaacaggcccagtcgatggttggcgccgccgccgcagagtaccgcgtatttcagcgcggtacgcagccctggcagcgttttgcgcgtatccagcagttgggttttggtgccggcgagcaggtcgacatagcgacggacgacgctggcgacgccggagagggtttgcacaaagttcagcgccgtgcgttcgccggtgagcagaatacgcgacgggccttccaattcgaacagcggctggtcggctttgaccgcatcgccgtcggccacgtgccaggtgatattcacatcgtcaccggcgagctgaataaagacctcttccacccagcgtttgccacagaagacgccatcttcacgagtaatgaccaccgcatgggagcgtgcatcctgcggcaataattgcgcgctaatatcgttgttggcgtcgacttcgccgcccagatcttcccgcagggagtgtgcgacagcatcggtaatatcgagattaatacgttccagcagcacgtcacggcggcggtcggggttgtaacgacgaggcgacatgataaagctccagatagataagattcagaagtgggaaacatgctaacctgaacgacgtttcagtaccatacacacttcatcctttgggccggcgtgtggcccggaagcatgagttcgcgaaaggagatcccgcatgcagttgaacgaggggtggttggtcggcgcgcgtcgggttccctcgccgcaccatgactgccgtccggatgaagagaccccttccttactggtggtgcataacattagcctgccaccgggggaatttggtggtccgtggattgatgcgctgttcactggtaccctggatccgcacgcgcatcctttctttgccgagattgctcatctgcgcgtttcggcgcattgtctgattcgccgtgatggcgaaatcgtgcagtatgtgcctttcgataagcgggcgtggcatgcgggcgtctcctgttatcagggacgcgaacgctgcaatgacttttccatcggcatagagctggaaggcaccgatactctggcgtataccgacgcgcagtaccggcagctggcggcggtgacggatctgctgatcgcgctttatccggctatcgccgaaaacattgcgggccacagcgatatcgcgcccgtgcggaaaaccgatccaggaccggcctttgactggataaaataccgtgcgctgctcagcgccccgtcagaaaaggagacctcatgacgctgtttacgacgctgttggtgcttatcgccgaacggctgtttaagctgggcgaacactggcagcttgatcatcggctggaggtggtgtttcgccggataaaacatttctcgttaccgggcacgctgctgatgacgctggtggccgtcgcggtcgtgtatatcattcagcgtctgctgcaggggcagctgtttaacataccgctgctggtgttctggattttactgggcctgctatgcattggcgccggcaaagttcggctgcactaccatgcctatctgaaagcggcgtcgcgcaatgacagtcgcgcctgcgatgccatggccagcgagctgacgctgattcacggcgtgccgccgggctgtgatgagcgtgagtaccttagcgaactgcaaaatgcgctgctgtggattaactatcgatactatctggcgccgcttttctggtttgtcgtggggggcgcctggggcccgctgacgcttatcgcctacagcgtactgcgcgcctggcagacatggctggcgcgctaccagacgccgcaccaccggttgcagtccgggatcgatggtatcctgcatattgtggactggctgccggtgcgtctggtgggggtggtctatgccctggtgggccatggtgaaaaagcgctcccggcgtggtttgcttcgctgggcgaccgccattcgtcgcagtatcaggtgttgacccgcctggcgcagtattccctggcccgtgagccgcacgtggataaagtagcgacgccgaaggctgcggtatcgatggctaagaagacttcgctggtggtagtggtgattatggcgctgctgacgatttacggtaccctggtttaacggcctgagcccgcgcgctgcctgccacgatgtacgtacctgcggggcttttgttgcctgatggcgctgcgcttatccggcctggcgagtcacccgcaggctcacgtcacgtaggcccggcaagcaacagcgccgccgggcgatatatcagacgccgtgctggtcatgttgccgggtggcggcttcgcctgacccggcctggagaacccgcgccagcgggtaacattccgaaccgctacagcgtatccgccggtggaataccgaagtcgggcatcccgtcttcccgccagctgaccagctttaaccgcgtatggcgattgggatcatacagcgggtcgccttctatctcagtgtaattccgcgcgtgatacaccagcacatcttccccttccggcgtttgggtaaaactattatgacctgggccaaactggcggttttcatagctggtgcggaacaccggctgcggagctttatgccagtttgccggctgcagcggatcggcctgccggtcgatccataacaaccccatgcagtagttttcatcggtggcgctggcggaatagctgataaatagcttatcgccatgcatcagtaccgcaggcccttcgttgaccttaaatccccggcactcccagtcgaactccggcttgctcagcatgaccggctcgccttttaacgtccacgggttagccatttcggcgagatacaggtttgagttgccttcgatatgcggggatttttgcgcccacagataccagcgtttcccctgatgggtaaaagtggtggcatcgagggcgaaggtatcgaaaggcgtgaccacctggcctttttcctgccagcggccggtcagcggatcgctgtcagcgcactcgagaacgaacatgcgatgctggaacatccccagcgcatccagatcgtgagtatgggtggcggcaaaatagatataccacttaccgtctatttcatgcagctccggcgcccaaatcagctggctcatcggcccgctttgcggcgcgcgccaaaccacgaccggctcagcatcgcgtaatccttcaagggttaccgcgcgccggatctccagccggtcgtattccggcaccgaggcaataaagtagtagtggctaagatggcgcaggataaaggggtctgcacgctgttcaataaaggggtttggccagttgttcatcaggctttccttacgtgttcactggttttcagttcctggtattcgttcagctcgctgtagttgctgcggcgcttctccagatcgctctgaatctggcgcatcagggtacggtcaaccttcagcaggcgcaccacgccggcggtgatcagatagccgacgccgggaatgactgagaatagcagcacgataccgttcagcgcggaggcgctttgcgctttcgcgccggcgtcgtagccgtaccatgacagcaggaaaccgaccattgccccggcgaccgccaggccgaccttgaggaagaacagattaccggagaagctgataccggtgacgcgcttgccggttttccattcgccgtagtcgtcaacgtcggacattagcgaccagtgtagcggggaagggatttgatgcagaatgttgagcaggaagtagagcaccataatcagcgtggtggcgtgtggattaaagaaatagaaggcgcaggagaacacggccagcacgatattggtccagaagaaaacctgcagtttgcaccagcggtcggtcaggactttcgccagcatgctgccaatcatcatcccaactacgccgaggctgataaacagggtggcaaaatgggtgctttgtcccatcacccaggtgacgtagtacatggtggcggccatgcggataaagcccggacagacgttgcacagcgtgagcagcaggatgcgcacccactggtcatttttccagacgtctttcagatcttttttcagttcgtcattcgtctgcaccgccgggcggatacgttcgcgcacggtggcgaagcagaacaggaacatacacataccgataaaggccagcacggtcatcgccatctggtagcccttcgctttatcggcgccgccgaaccagtcggccattggcagcagcgtcaatgacagcaggagcgtggcgatacccaccatgacgaaacgataagactggcaggcaacacgctctttcggatcggcggtcatcaccgttcccagcgagcagtaaggaatattaatcgcggtataggtaatcgacagcagaaagtaggtcacaaacgcatagatgactttgctattgtaggtccactcaggagtggtgaacatcaggacgctgaacagggcgtaggggaaggcgatccacagcagccatggacgaaagcgaccatatttactacgggtgcggtcggcaagagcgcccatgatagggtcggttaccgcatcgatgactcgcaccgagagcagaagtacgccgaccagcgccggcgctagtccgaatatatcagtgtaaaaatagttcacaaacagcatgatggcgccaaagataatattgcatccggcatcacccatcccgtaaccaatcttttctcttattgaaagcgtgttctctgccatgtgcggtctctccgttgcagtatggagagaattattggctgcggttggcagaaatacgttgcaagaactcgttgacgatatggataaataagctatggaggggaaagtgtgaagcagataacaatgctctgcgcccattattcaggggagggcgcagagcaaagtgaagtattgatgagatgtattattgtgcttttatggtggcggcggctttctctttaaacagatagcccacgcccagcaccgcaatccataccgggatcagccagacggaaatcgccatccccggggtcatcagcataatcaccagcaccgccgccataaacagcaggcacagccagttgcccagcggatagaagagggccgggaaacgcgtgaccacgccctgctgctttttggcgcgacggaatttcatatgcgcgaggctgatcatcgcccagttgatgaccagggctgagaccaccagcgccatcagcagaccgaaagcagattcaggcgccaggtagttgatcagcacgcacagcgcagtgaccagggccgagacgagaatggtattcaccggcacgccgcgtttgtcgacgctgagcagcgcttttggcgcgttgccctgctgagcaaggccgaacagcatacggctgttgcagtacacgcagctgttataaaccgacagcgctgccgtcagcaccaccacgttcagagcgtttgccaccagcgtatcgccaagttcatggaagatcaggacgaacggactggtgtccgcggtgacgcgggtccacggcagcagggagagcagcaccgccagcgaaccaacatagaagatcagaatacggtaaataacctgattggtggctttaggaatgctttgctccggattatccgcttccgcggcggtgatccccaccagctccaggccgccaaaggagaacatgatgatcgccatcatcatcaccagcccgtaaaagccgtgcggcaggaagcccccctggtcccacaggttacgtaccgtcgcctgcgggccgccgttgccgctgaacagcagccagccgccgaacaaaatcatcgccactacggcgaccactttgataatcgcgaaccagaattccatttcaccgaacactttgacattggtcaggttaatggcgttgatggcgatgaagaagaccgccgccgaggcccaggtagggatttccggccaccagaactggatatatttgccaacggcggtcagttccgccatggccaccaggacatacagtacccagtagttccagccggaggcgaagccggcaaaaccgccccagtatttgtaagcaaagtggctaaatgagccggccaccggctcttccaccaccatttcgcccagctgacgcatgatcaggaaagcgataaaaccggcgatagcgtaaccaagaatgatacccgggccggcggactgaatgacggacgcgctccccagaaacaggccggtgccgatagccccgcccagcgcgatgagctgaatgtgacggtttttcaggccgcgcttcagccgatcgccgtgctgttgaccttccatatgaaacctcgtgtgtggttattttttgtgtacgtcatccgtcaggttgctgcttcactgctgtctctgcctgaaagcatagccagcgaaaatttgggcgaagtggcccactttttacccgagtgatggcgcgcacatattgttgtgtttgtgtattttggaacttccgtttctgtattgttttgtttacggaaggctgtgtggtaattccgaaaaaggcctttcgtctccggcagaatagtggtaagcgcatttgaatgcacctgctttatgaagggatgatgacgatgtgtctaaaaagacatcaatagtcacaatctgtcgtattttgatgcatgctgttttgtcattatttattcactgtaagtgactctgtattcatttattgcagcgttgaatcggttcagaaagcgtaatttttcgtttctataaagttaaggctacctctttgtgagtaaacgtaacatttgtgcaaggttacatttctgaaatgttatttctgtaaggttgttaaaatgtcccaggtttactgatttcaatcaaaacctgtatggacagaaggtgaatactttgttactttagcgctacgaactttaaattggtaagaccaattgactccgggctaatggcagagacagggaatatggcctacagcaaaatccgccaaccaaaattatccgatgtgatagagcagcagctggagtttctgattcttgaggggaccttgcgccccggtgaaaaactcccgccagaacgcgaactggctaaacagttcgacgtttcccgcccctcgctgcgtgaggcgattcaacgcctcgaagccaagggcttgttgcttcgtcgtcagggaggtggaacgtttgttcagagccgcctgtggcagagcttcagcgatccgctggttgagctgctgtccgatcaccctgaatcccaattcgatttgcttgagacccgtcacgcgctggaaggcatcgcggcctattacgcggcgctgcgcagcaatgatgaggatcgcgaccgtatccgtgagctgcatcaggctattgaacgcgctcagcagtcgggcgatttggacgctgagtccggcgccgtcgtccagtatcaaatcgccgtcaccgaggcggcacacaatgtggtgttgcttcatctgctaaggtgtatggagccgatgttggcgcaaaacgtgcgtcagaactttgaattgctgtatgcccggcgggaaatgctcccgttggtcagcaaccatcgcactcgcattttcgaggcgataatggccggggagccggagcaggcgcgtgaagcgtcgcaccgtcacctggcgttcattgaggaaattttgctggatcgtagtcgtgagcagagccgtcgagagcgctcactgcgtcgtttacagcaacgaaaggacgagaactccggttcttaagcgccatttttagagcgcggcaactaaacgcagaacctgtcttattgaatttttggttgttccagcgtgaagaacgaagagttcaatgggacaggttccagattaatcaacgattagatagataaggaatacccccatgtcagaacgtttacacaatgacgtggatccgatcgaaactcgcgactggctacaggcgatcgaatcggtcatccgtgaagaaggtgttgagcgcgctcagtatctgattgaccaactcctttctgaagcccgtaaaggcggagtgaaggttgctgcaggcgcttccgccggcaactacgtcaacactattgccgttgaagatgagccggaatacccgggcaatctggatctggaacgtcgcattcgttctgcgattcgctggaacgccatcatgaccgttctgcgcgcgtcgaaaaaagatctcgaactgggcggccacatggcgtcctatcagtcttccgcgaccttctacgaagtctgcttcaaccacttcttccgtgcgcgcactgagaaagatggcggcgatctggtgtacttccagggtcacatctctccgggcgtatatgcacgtgcgttcctggaaggccgtctgaccgaagagcagatggacaacttccgtcaggaagttcacggcaagggcctgtcctcttatccgcacccgaaactgatgccggaattctggcagttcccgaccgtatccatggggctggggccgttgggcgctatctatcaggccaaattcctgaaatatctggaacaccgcggtctgaaagacacctccgaacaaaccgtttacgccttcctgggcgacggcgagatggatgagccggaatcaaaaggcgctatcaccatcgccacccgtgaaaaactggacaacctggtcttcgtcatcaactgcaacctgcagcgtctggacggcccggtcaccggtaacggcaaaatcattaacgaactggaaggcatcttcggtggtgctggctggaacgttatcaaggttatctggggcggccgttgggatgagctgctgcgtaaagacaccagcggtaagctgattcagctgatgaacgaaaccgttgacggcgactaccagaccttcaaatccaaagacggcgcttacgttcgtgagcacttcttcggcaaatatccggaaaccgctgccctggtcgctgactggactgacgagcagatctgggctctgaaccgcggtggtcacgatccgaagaaagtctacgctgcattgaagaaagcgcaggagaccaaaggtcagccgaccgtgatcctggcgcataccattaaaggttatggtatgggcgataccgctgaaggtaagaacatcgcgcaccaggttaagaaaatgaacatggacggtgttcgctacgtccgcgatcgtttcaatgtgccggtggcggatgccgatctcgaaaaactgccgtacgtaaccttcccggaaggttccgaagagcacacttacctgcacgctcagcgtcagaagctgaacggctatctgccgactcgtcagccgaagttcactgagaaactcgagctgccgaccctggccgacttcagcgcgctgctggaagagcaaaacaaagaaatctctaccactatcgctttcgttcgcgccctgaacgtgatgctgaagaacaagtcgatcaaagatcgtctggtgccgatcatcgccgacgaagcgcgtaccttcggtatggaaggtctgttccgtcagatcggtatttacagcccgaacggccagcagtataccccgcaggaccgtgagcaggttgcttactacaaagaagacgagaaaggccagattctgcaggaagggatcaacgagctgggcgcaggcgcatcctggctggctgctgcgacctcttacagcaccaacaacctgccgatgatcccgttctacatctactactcgatgttcggcttccagcgtatcggcgatctgtgctgggcggctggcgatcagcaggctcgcggcttcctgattggcgggacttccggtcgtactaccctgaacggcgaaggtctgcagcacgaagatggtcacagccacattcagtcgctgactatcccgaactgtatctcttacgacccggcgtacgcctatgaagtggctgtcatcatgcatgatggtctggtccgtatgtacggcgaagcgcaagagaacgtttactactacatcactacgctgaacgaaaactaccacatgccggccatgccggaaggcgccgaggaaggtatccgtaaaggtatctacaaactcgaaaccatcgaaggtagcaaaggtaaagttcagctgctgggctccggttctatcctgcgtcacgtgcgtgaagcagcgcagatcctggcgaaagactacggcgtgggttccgacgtgtatagcgttacctccttcaccgaactggcgcgtgatggccaggattgcgaacgctggaacatgctgcacccgctggaaaccccgcgcgtgccgtatatcgctcaggtaatgaacgacgctccggcagtggcatccactgactatatgaaactgttcgctgagcaggttcgtacttacgtaccggctgatgattaccgcgtactgggtaccgatggcttcggtcgttccgacagccgtgaaaacctgcgtcaccacttcgaagtcgatgcttcctatgtggtcgtagcagcgctgggcgaactggctaaacgtggtgaaatcgataagaaagtggtggctgacgctatcgcgaaattcgacatcgatgcagaaaaagttaacccgcgtctggcgtaagaggtaaaagaataatggctatcgaaatcaaagtaccggacatcggggctgatgaagttgaaatcaccgagatcctggtcaaagttggcgacaaagtagaagctgaacagtcgctgatcaccgtagaaggcgacaaagcctctatggaagtcccgtctccgcaggctggcgtcgtgaaagagattaaagtctccgtcggcgacaaaaccgagactggcaaactgattatgattttcgattccgccgaaggtgcagccgccgctgcacctgcgcaggaagagaagaaagaagccgctccggccgccgctgctccagcggctgccgcggcagcgaaagaagttcacgtcccggatatcggcggcgatgaagtcgaagtcactgagatcatggttaaagtgggcgacaccatcgccgctgagcaatccctgatcaccgtagaaggcgataaagcctctatggaagttccggcgccgttcgccggtaccgtcaaagagatcaaaatcaataccggcgataaagtttccaccggctccctgattatgatcttcgaagtggcgggcgctgcgcctgcagccgctccggcacaggctgccgcgccggctgctgcggctccggctgccgcagcaggcgtgaaagatgttaacgtcccggacatcggcggcgacgaagttgaagtcaccgaagtgatggttaaagtcggcgataaagtcgcggcggaacagtccctgatcaccgtagagggcgacaaagcctctatggaagttccggcgccgttcgcgggtaccgttaaagagatcaaaatcagcaccggcgataaagtcaaaaccggttccctgattatggtcttcgaagtggaaggcgctgcgcctgccgccgctccggctcaggctgctgccccggcaccagctgctgccccggctcaggccgctaagcctgccgctgcgccggctgcgaaagcagaaggtaaaagcgaattcgctgaaaacgatgcctacgttcacgcgaccccgctgattcgccgcctggcgcgcgagttcggtgttaacctggctaaagtgaaaggcaccggccgtaaaggtcgtatcctgcgcgaagacgttcaggcttacgtgaaagaagcggttaaacgcgctgaatccgcaccggcggctgccgctggcggcggtatcccgggcatgctgccgtggccgaaggttgacttcagcaagtttggcgaagtcgaagaagtggagctgggtcgtatccagaaaatctctggcgccaacctgagccgtaactgggtgatgattccgcacgttacccacttcgacaaaaccgatatcaccgatctggaagcgttccgcaagcagcagaatgccgaagctgagaagcgtaaactggacgtgaaattcactccagtggtcttcatcatgaaagcggttgccgctgcgcttgagcagatgccgcgcttcaacagctcgctctccgaagatggtcagcgcctgacgctgaagaaatacatcaacatcggtgtggcggtggataccccgaacggtctggtggttccggtcttcaaagacgtgaacaagaagagcatcaccgagctgtctcgtgaattgaccaccatctcgaagaaagcgcgcgatggcaaactgacggctggcgaaatgcagggcggttgcttcaccatctccagcatcggcggcctgggtaccacccacttcgcgccgattgttaacgcgccggaagtggccatcctcggcgtgtctaagtccgcgatggagccggtatggaatggtaaagagtttgtgccgcgcctgatgctgccgatctctctgtccttcgaccaccgcgtcatcgacggtgctgatggtgcccgcttcattaccatcattaacaacaccctgagcgacattcgccgcctggtgatgtaatcgaaaaagccggcctgacggccggcttttttctgataacctcaggctgttggggattatcagcaacaaaggacaaaatcgtttgccgtttgttgtttaaaaattgttaacaattttgtaaaatacacgcggatagaacgtcccggtggacttgggcgtaagaataatagcgtcagacccgccggatataaattacagaggtcatgatgagtactgaaatcaaaactcaggtcgtggtacttggggcaggccccgcaggttactctgcagccttccgttgcgctgatttaggtctggaaaccgtcatcgtagaacgttacagcaccctcggtggtgtttgtctgaacgtgggttgtatcccttctaaagcgctgctgcacgtggcaaaagttatcgaagaagcgaaagcgctggccgaacacggcatcgttttcggcgaaccgaaaactgacattgacaagatccgcacctggaaagaaaaagtcatcactcagctgaccggtggtctggctggcatggccaaaggtcgtaaagtgaaggtggttaacggtctgggtaaatttaccggcgctaacaccctggaagtggaaggcgaaaacggcaaaaccgtgatcaacttcgacaacgccatcatcgcggcgggttcccgtccgattcagctgccgtttatcccgcatgaagatccgcgcgtatgggactccaccgacgcgctggaactgaaatctgtaccgaaacgcatgctggtgatgggcggcggtatcatcggtctggaaatgggtaccgtataccatgcgctgggttcagagattgacgtggtggaaatgttcgaccaggttatcccggctgccgacaaagacgtggtgaaagtcttcaccaaacgcatcagcaagaaatttaacctgatgctggaaaccaaagtgactgccgttgaagcgaaagaagacggtatttacgtttccatggaaggtaaaaaagcaccggcggaagcgcagcgttacgacgcagtgctggtcgctatcggccgcgtcccgaacggtaaaaacctcgatgcaggtaaagctggcgtggaagttgacgatcgcggcttcatccgcgttgacaaacaaatgcgcaccaacgtgccgcacatctttgctatcggcgatatcgtcggccagccgatgctggcgcacaaaggtgtccatgaaggccacgttgccgcagaagttatctccggtctgaaacactacttcgatccgaaagtgatcccatccatcgcctacactgaaccagaagtggcatgggtcggtctgaccgagaaagaagcgaaagagaaaggcatcagctacgaaaccgccaccttcccgtgggctgcttccggccgtgctatcgcttctgactgcgcagatggtatgaccaaactgatcttcgacaaagagacccaccgtgttatcggcggcgcgattgtcggcaccaacggcggcgagctgctgggtgagatcggcctggctatcgagatgggctgtgacgctgaagacatcgccctgaccatccacgctcacccgactctgcacgagtccgttggcctggcggcggaagtgttcgaaggcagcatcaccgacctgccaaacgccaaagcgaagaaaaagtaactttttctttcaggaaaaaagcataagcggctccgggagccgctttttttatgcctgatgtttagaactatgtcactgttcataaaccgctacacttcatacatactttgaaaatagtcactcagtaaacttataggtagttaatgatatcgatgaggtgtgagatgaaacgctttttaaccacagcgctggtcgctgcaacgttttttaccggtgtggcttgcgccgctgacgccaacattccctgggcggacaacagcggcggtacggaaacgacccacattgcggcgatgggccaggatctgaatgcccagcatcagcaggtgacgaagaccaatgaaggggtatgggcggcgaattccggtagcatcagcgctgacgaagcggcattatccagcacaaaaccagcctttgccggcgatccttctctgatgcctcaccagggctaagtgaatgaaaacgcccggttgcgtgagtgcaaccgggcgttttttttaaggttctgccacttgccagccggcgtcagcgtcgggggtaaaacgcgttatctcctgtgcctttgcggcgctctcttcaccgagattggcctgatagaccctatcctgctgatcgatcataaagctcatcacgccggtttcaccccaggctatcggccaggccagcaaggcgacgctctggtcatcgcgaccggcgataattcgaaagcgatagccatggtagccgctaccgggcaccgtcgggctaaaggccggaccgagcgggcttggcgcttcgcccggcgaagttggccagtacaagccatcttttttgccttcgctactgatgattttctgcgcccagcggtggttcagatgataataatcctgctgggcatcaacataggcatgcatggcggcgatcgccgacagctcattgcggccgatggcgcgggtgaggatctcctcttcgccagcggccatatcaaagcgccatccctcagacgcttttacgataggcacgggcagacgccatgcctcgctaccgacatcgagccaggctttgtcaccctgctggatgatgacatgtttcacctgccagtcgcgttgaaagcgatcgacggcggcagggtcgatcccgtccgtgggtaaaaactgctgccagttatcgccgagtacttcgctcagcgcggcttcattaggctggctgatcgcttcggccagcgcagttgcggcctgttccggcgtggcaaactgctgttgggcgaaggcggcaagcggcgacagcattaacgtaaacagggcaacggataatgggtttctcattctgctcatccttagcggcgacgcagttcatggtgttcggaaagacgttctctggcgccctcgcgtaactcgcggtttacgccggataactggcggctctgcagtcctcgttcctgctgcgcttgccaggagggggcgcggctttcgttgccgctaagggcgttggcgcgcagatggctgagcgtctgctgacgctgggctggcgtggcggactggaactgctgccggcgctgctgctgctgaggtgtgcggttctgctcgtggctcctggcggcttctcgacgctgctgttgctgcggcgtgggggttttcagctgcgtttttgccgcctcgcgacgctgctgttgggtcggcgtgctgtcgtaaccgcggtaattactgcgttgggtggcttgcttcagctgcgccgaggccgcctgacgctgggcgtcgcgtgaggcgttgtttgccgccagattgcccgctgtggccgtcggtacgttatgctgcagctgggtcatcgctgcctggcgctgcgcttcgcgatcgactggcgcatgttgggtcgcgctcagtccgccggaaacgttggtctgatggaagcgctgagctaccgtattatcgggatacggtgtgtgtccgcgataggcaggattgtgctgccagttaacgtggtttcccggcaggttttctcctgttatatgattgaaattatttacattaatattgatgttatcgccattatgcgagtaatcgccgtggcggtagtcgtcatcgtgatggtgatggtcatcatcatcccagtcgatactgctgaacagcgcccaggtggtggccacgccgaggctgtacccgaagcctttgacgaagctatcggtaaactgctccccgggagggggcggcagatagaccggcggataggcgctgttcggccaggtaccatagacggtggaggggttatagctgggaacatagaccacctgtggattggtcggctctattttaatgacctgcgtgggcgcaggcgccgctgtgtgggcggttgcggttgctgccgtgctgctgctggctgaaaccagtgcggcaggggtgacaatcactttctgctgcggtgtggatttcagcgtcccggtttgttgggcaatggcgcgcaggcgctgcactgaatccatcacatcatgcggctgggccaaaaacgcattgccaagattttccacccagggcggattctcgcccatcatcgccagcagggcagggaaagcgacaagagatttgacgctagggtcccacggctggctggcaaccgcctgcacggccgcatcccctttcatcgcggggttatcctgggaccactggaccgcctgcaggacgttgtcgggataagtggaggccatcaacacctgcgacagcagactgtccgggtagagcgcgataggggcgacccactgatcaatttgcgcctgggtgtaagtggcggccaccggctgtgtcgtcgacgctgcgggcgctggcgcttgctgcgcaggcggttcagcgatcgtcgctggggttcggctttgtacatagagtgttcctgccgccgcgagtaagccagcgctacagagcagggcgataatatggggtttgaacggcagtgacatggaaactcctgacccaaaaagtaacccatctcgctaaagtatctgcgaaaacggcgcgtttgctgagtataagtaagcggtatggctttttattgattattgttgggatcggcccgtggcgttgtacgcggaaaggaatttttgtcgcgggatttgaacagaaagcctgcaatatcctgcccttaacgattcagctaaattttaatgttgcttttttgtaaacagattaacacctttcaaaaatcctgctatgctgccgacgcggtatcgggcatttaccctacaaactgctgtctcacaggagcgtgaagaaaatcgcccagccactaaatccttcaagatgcgtcacgcggcaagctaagccaggacagaggcagattgattgaagacgtgtaggccgcattatgacaatgagagcgaggagaaccgtcgtgctagaagaataccgtaagcacgtagctgagcgtgccgccatggggattgttgccaaacccttagatgcaacccaaatggccgcgctggtagaactgctgaaaaacccgcctgcgggcgaagaagaattcctgttagacctgctgattaaccgtgtaccgccgggcgtcgacgaagccgcctatgttaaagctggattccttgccgcgatcgccaaaggcgaagcgacctcccccctggttacccctgaaaaagccgttgaactgctgggcaccatgcagggcggttacaatatccatccgctgatcgatgcgctggacgacgcgaaactggcgccgattgccgcgaaagcgctctcccataccctgctgatgttcgataacttctacgacgtggaagagaaagccaaagcgggtaacgagcatgctaaacaggttatgcaatcctgggctgacgccgagtggttcctgaaccgtccgcagctggcagagaaaatcactgttaccgtcttcaaggtcaccggcgaaacgaacaccgatgatctctctccggcgccggatgcgtggtcgcgcccggatatcccgctgcatgcgctggcaatgctcaaaaacccccgcgaaggtattgagccggatcagccgggcgtggttggcccaatcaaacagatcgaagccctgcagcagaaaggctacccgctggcctacgtcggcgacgtggtcgggaccggttcttcacgtaaatccgccaccaactcggtgctgtggtttatgggcgacgatatcccgaacgtgccgaacaagcgcggcggcggcctgtgtctgggcggtaaaatcgcgccaattttcttcaacaccatggaagatgcgggcgcgctgcctatcgaagttgatgtgtctaacctgaacatgggcgacgtaatcgacgtttacccgttcaaaggcgaagtgcgtaaccacgagaccaacgaactgctggccagcttcgagctgaaaaccgatgtgctgatcgacgaagtgcgcgccggcggccgtattccgctgatcatcggtcgcggtctgaccaccaaagcgcgtgaagcgctgggcctgccgcacagcgatgtcttccgtcaggcgaaagacgtggcggaaagcacccgcggcttctcgctggcgcagaaaatggttggccgcgcctgcggcgttgccggtatccgtccgggcgcttattgcgaaccgaaaatgacctccgtcggttctcaggacaccaccggtccaatgacccgtgatgagctgaaagacctggcgtgcctgggcttctctgcagacctggtgatgcagtccttctgccacaccgcggcctacccgaagccggttgacgttaccacgcaccacactctgccggacttcatcatgaaccgcggcggtgtttctctgcgtccgggcgatggcgtgattcactcctggctgaaccgcatgctgctgccggataccgtgggtaccggcggtgactcccacacccgtttcccaatcggcatctccttcccggcaggctctggtctggtggccttcgccgccgcgaccggcgtgatgccgctggatatgccggaatcggtgctggtgcgtttcaaaggtaaaatgcagccggggatcaccctgcgtgacctggtccacgccatcccgctgtacgccatcaagcagggcctgctgaccgtggagaagaaaggtaagaaaaacatcttctctggtcgcatcctcgagatcgaaggtctgccggatctgaaagtcgagcaggcgttcgagttgaccgatgcctcggcggagcgttctgccgccggctgcaccatcaagctgaataaagagccgatcgttgagtatctgaactccaacatcgttctgctgaagtggatgatcgccgaaggctacggcgaccgccgtaccctggagcgtcgtatccagggcatggaaaaatggctggcggatccgcagctgctggaagccgatgctgacgcggaatacgcggcagtgatcgacatcgatctggcggatattaaagagccgattctgtgcgcgccgaacgatccggacgatgcccgcctgctgtctgatgtgcagggcgagaagatcgacgaagtgttcatcggctcctgcatgaccaacatcggccacttccgtgccgccggtaagctgctggatagccacaaaggccaactgccgactcgcctgtgggtggcgccgccaacccgtatggatgccgcgcagctgaccgaagaaggctactatagcgtgtttggtaagagcggggcgcgtatcgaaatccctggctgttccctgtgtatgggtaaccaggcgcgcgtggccgacggcgcgacggtggtttccacctctacccgtaacttcccgaaccgtttaggtaccggcgctaacgtctatctggcctctgccgaactggcagcggtggcttcgctgctcggcaaactgccgacgccggaagagtaccagaccttcgtggcgcaggtggataagacggcggaagatacctaccgttatctgaacttcaaccagctggatcagtacactgaaaaagctgacggcgtgatcttccagaccgcggtgtaaaccattcggtcagcccggctgaccgtttggcgataaactctccaatgcccggtgaacattgcatcagcgggcatttttatttccaaacctcccgcccgctacgctttttttctttctgtctgctgcgataattactgcatgggtacagtgcagcggtgacgcattgcccttgcagaggaaaagactatggattacgaatttctgcgcgatattaccggagtggtaaaggtgcgaatgtcgatggatcacgaggcgatcggccactggttcaacgaggaggtgaaaggcaatcttgctctgctggacgaagtggagcaggctgcgcgcaccgtgaagggcagcgagcgttcctggcagcgtgccgggcatgaatatacgctgtggctggatggcgaagaggtgatgatccgcgccaatcagctggagttttccggcgacgaaatcgaggaggggatgagctactacgacgaagaaagtctctctctgtgcggtgttgaggatttcctgcaggtggtcgccgcctatcgtgagtttatgcagcagcgttaatgacgccttttatgtcgggcggcgcagaactacaggcccggcaagcaaaagcgccgccgggcatttcatagattacacggcaggaatattgcggccgtagtaaatctcgcgcatctctttccatagcaggtcggtaatgaccttgcgctcttcggcagtcaactcttccggtcgggtatggaacatgtagtgcttaaggtcgaactccttgagcaacattttggtatggaagatattttcctgataaacgttgacgtcgaccatgtcatacaacgacttcatatcgtcggacataaagttctgaatcgaattgatttcatgatcgataaaatgcttcatcccattgatatcgcgggtaaagccgcgcacacggtagtcaatggtcacaatgtccgattccagctggtgaatcagatagttcagcgctttaagcggggaaatgacgccgcacgttgaaacttcgatatcggcgcggaaggtgcacaggccgccctccggatggctctccgggtaggtatgcacgcagatatggctcttatcgagatgggcgaccacggtttccggtagcgggccaggatgttcggtctggtcaatcagcttgggatcgacaggctcttcgctgaccagaatggtcacgctggcgccctggggttcataatcctgacgggcgatattcaggatattggcgccaataatagaacaggtttctgtcaggatctccgtcaggcgattggcattatagagttcgtcgatataggcgatgtagccgtcgcgctcttctgccgttttggcgtaacagatatcgtagatacaaaaactcaggcttttggtcaggttgttaaagccgtgcagcttcaattttttcaatttagttcacccccttatttcgcgtcacggtgcggacagagcatcatgcagatattgtggtaaggcgaaggccgccgtatggattgccggattgtagtaacggcaggtcaggttggctttgtgaaagcgcgcctgaatgatttcgctggagagatggcgcagcgcctcattgtcgctcgcccaggcaaaggtcatgatcccgccgtaataggttggaattgccgcctggtagaagctgacgtcgcgaaaatagtggcttagcttgcgatggctgcctaccgcttcatcctgttgcaggaagcagacgccattctgggcaacaaagatcccacccgggttcaggcagcgtttgcagccttcataaaaagccgaggtgaacaggctttctcccgggccgatagggtcggtacagtccgaaatgatcacgtcaaacgtttgcgtcgtctgattaacaaaattgacgccatcatcaatcaccagcgtaaagcgcggatcgtcataggcgccggcgttatggttcggcaggtactggcggcagaatgaaactaccccggcgtcgatttccaccatggtgatggtttcgatgctacggtgacgagagacttcgcgcagcatcgcgccatcgccgccgccaatgatcaacacatgcttcgcgttgccgtgagccagcagcggcacatgggtcatcatttcgtgatagatgaactcgtcgcgttcggtggtttgtacgacgccatccagcgccatcacccggccaaaggcgcggttatcaaagatgatcagatcctgatgatcggttttttcgtggtacagcacgttatcaacgctaaaatactgaccaaaatggtcatgcagcgtttcatgccacagtggattatcggccacgataaggctcctccttcgttaacatctgttacacccgtaaaacgagtgcaacatcatagacaactatagatgaggatgcacggcggttattgcagcaatgaggcaggaataacagccaccgccccggaagggcggtggagaggatgaggctattttgccggctcgggttggctatctactatccgcacggaataaaccatggtggcgcctggcgggatttttggcggtaatcctttactgccataggccttttcaggcgggacgacgagcgtcacagagccgtggttctgtagacgcttcagcggttcgcgaaacaccgggggataggcatccagcttttgcgtaagcgcctgatctttcgcttccatatcgttgatcaccgtcccgtccgtcagcatctctttgatcaccacggtaaccaggtcgttaccgcttatttttcctttacccaggtaatcgacgcggctgtagacgccctctttaaagaccacatcttttttgcgcgcaaacgcctgctgatatttcttgccggcactgatgtttttctgctctattttattcaggttctgaaaaacctgctgtgacacatcaaacagcgccttgttacgttcctgctctccgagacgaagctggccgcgaaaggcatcttcgatgccctgcagcaccaggcctgcgtcgacggtaactccctgagtgcgacgggtggtaaggacgttgagcgcctcgcttcccatcgaggcgccgatcgcataagcctgctgttctcccgatgcgctgagtttggcggcggcgctctcgccgctgcgcgttttggactgtacagaaagctgcgttctcagcagttcgatttcatcttctttcatccgtagctgggcgttgtctttatccgcctgcaggcgataggctgccactatggccgccatctctggtggctcattttttggcgcagcggcgtcgttagcggggccatgcggcgctttatccacggcggccagccgggtggacagagattgtttatcggcgttaagggctttgacctgatcgagggcagcctgctgcgtcttttccgcagcggcgaggcgaatagtcagcgactgcttatcggcgttaagggctttaacctgctcgaggacggcctgtttctctttttccgcggcggccagccgggtcgccagcggctgtttgtcagcgttaagcgctttagcctggtcaagagcggcctgctgcgccttctccgcagcggcgaggcgaatagtcagcgactgcttatcggcgctaagggccttaacctgctcgaggacggcctgtttctctttttccgcggcggccagtcgggtagccagcggctgtttgtctgttgtggtcaagtttttttggacacgccgatcagatggtagggttatgcacaggcgggcaactgggcggcagggctggccagcgtttcgtactgtgcgggtgatcggtagccaagttttgaatgcaatcgggtactgttataaaagttaacgatgtagtcggtgatgtcttgtttggcttctgtatggttggcataccgagtctgccagacacgctccattttcaaattcagaaagaaccgctccatcacggcattgtcccagcaattacccttgcggctcatgctgagtaccagaccatggttttcaagtaattgccggtgttcagcactggcatattgactgccccggtccgaatgaaccaataaacccggtgccggttggcgaaccgaaatagccatgctcaacgcatcgcacaccagctgtgcaggcatggtcggtgccatggaccaacccacgatgcgacgtgaatacagatccagcacagcggccagatatagccaaccgctgtcggtccgaatgtacgtcacatcgcacacccaggccgtattgggtgcttcaggctcaaactgacggttgagcacgttctctgccaccggcaaatggtgtttgctatcggtggtatgagcgaacttgcgacgccaacaggccttgagtccacaggctttcatcaaggtacgacagcgatgacgtccaacatcatggccctgggcacgcagggctgcactcaaacgacgactgccataggtgcgaccactggcaagaaaaaccgcctgagcatgcacgctgtcctggcaaataggtttgggtgtattgactctgcgacgcgctgcgtagtaaccagagcgactgatgtccaacgcctgacagacctgcttgatcggggcctgcttcgctaactcagtgacaacatcgtggatcactttatttcccgtgcgaagaaggccgaagctttttttaataattcattgtctgattttagtcgcctgacttcggcttccagttctcgaatacgttgctgctcagccgttaacggtttaccaatccccggcctgccggctgactcgtcatccagttggtgtacccagcgtcggaccacactttcggtcagcttcatttcgcggcagacttggctgacgctgacgccttgctcgcgcaccatgcgcgccacctgtaacttgaacgctggatcaaaggttcggcgattcttggttgtgtcggttgtcttgtcggtcatctcttcatgttccttgtcggggggaaaacacccgatcaaagtgtccatttaaatttgaccacaacagtcagcgttaagcgctttagcctggtcaagagcggcctgctgcgccttctccgcagcggcgaggcgaatagtcagcgactgtttatcggcgttaagggccttaacctgctcgaggacggcctgtttctctttttccgcggcggccagccgggtcgtcagcggctgtttgtcagcgttaagcgctttgacctgctcaagagcggcctgtttctctttttccgttgcggccagttgggtcattagcgcgtgtttatctttattaagcgtggtaaagctggcgctgaggcgtttattttcagcttcggcttgctgaatctgcgtcgttaattgctggatctgctgacgcgccgcggcctggctttgctgtagattattattctgcacaacgcctgctttttttattaatgcctctttttctgcagtagcggcgcttaaggcgacctgtaattcattaattctcttattcaacgccgcttgctcattcgctccggcagtatccgtttgcggcgtagcggcaagctgtttttttaattgctgtataagcttatctttttgtgcaatcgccgcctgctggctggtgattcttttttgtaattgtgaggtgctggtaccggtttttttattatctgcgctctggcggctttcttgtgtttgttttgcgcttgcggcatcgtttttttcttgcgcctgagattgctgggtttgctgttgggcgtaatcaagaaaggccggcgcggcgccggcggtgaagggggttgaaagcgccagcgcagcgacgagcatcagcaggggcgcgttgagggtcagcgtggcggctctgttcatggctgtttgctttcaccacgctgtaccaggctatcgatcagcgttttctggatatcggcgcacagtttgatggatttaaactgatacatggagtcaatgccaagccgggtaggatctgccactttctcgcgcacgctattatattgtgacgccgcgcgcactaaagcgttaaagtcattgctgagtttagtggcttgctgtgggttaacctcttttagcgaatccagcgcctggcgacaggattcaatgcgcgcttgttcgctggctgcccgctcctgctctgcctgctgctgtgtcgtcagcggcgtggcgatcggtttaaccggctggcgggaagaggtattgctacagccggctactaacagcgcggcgagtgggataacacgaagagtcagcgagatattcacaatttcagtccatgaagtaggtatatttttaccggattctagaagggtgctttttattttgcaatatatgaataatgatattttattagttttttagtcattcttcattattatgggtttactttatttggcaaattgataggttcgcaattaaataaggtttgtttatatacaataataaatataaatatttaaagggggaagttgaaatgctaaaggcgcggagcgttgccgcccgcgcagggaattatttaacgtaagccagcaggctgagcgaatcgcgggccagcgctttacattttttcgccgtcggaatgttaatgccgctaagatcgcgatagctgtcttcgccaagcgctttcatgttgtagctgtcatagttgctcaggtcccactggttctgttgggcaaagaacaccagcgcgcgacggatctgcgtgttgggcaggttctggtagccacagtcgtttttcagaaacacaaaaaccgcggttaaatcagccatatcttccgcttcggattcgctgagcgcgtagctgttggcggagagagcaagcaggctgccgagtaccattgttctgaaaagcgtcttcattttttctaccattagatcaccgacgcttcaaattagcatacttctttacacagcgccgatctttattcttactcttctgcttgaccttcccgttacggtagggtttaagctcaaatattcgcccgcagaataaaaggatgtgaatatgcaacgtagagacttcctcaaactgaccgccgcggtcggcatggccagcgcattgccgttatggagccgggcggtctttgccgccagtcgcccggctctgccgataccgtcgctgttagccgccgatgcgcgcaaccgcatcgcgctcaggatccaggcgggcaaaacgcggtttggcgccctgaatgtcactacctggggctacaacgggtcgctgctgggccctgcgctgcagttgacgcaggggaagaccgtcacggtggatattactaaccagctggcggaagagaccacgctgcactggcatggtctggaggtaccgggcgaggtcgacggggggccacagggggttatcgcgccgggcgccacccgcacggtaagcttcacgccaacgcagcgggcggcgacctgctggtttcatccgcatcagcatgggagcaccggccggcaggtggcgatggggctggccggcctggtgctgatcgaggatgaagagagcgggcgcctgctgctgcctaagcagtgggggatcgatgatgtgccggtgatcgtccaggataagaagttcaccgccgccggcgagatcgactatcagctggatgtgatgagcgccgccgtcggctggtttggcgatacgctactgaccaatggggccctctatcccgaacatgccgcgccgcgcggctggctgcgcctgcgcttgctgaacggctgtaatgcccgttccctcaattttgccaccagcgataagcgcccgctgtacgtagtggccagcgatggcggtctgttggccgagccggtcaaggtcgatgaattgccggtcttgatgggggaacgctttgaggtgctggtggacaccagcgacggtaaacctttcgatctggtgactctgccggtgagccagatgggcatggcgattgcgccttttgataaaccacagccggtactgcgcgtccagccgctggtcattcccgcctccggcaagctgctggatactctggccgctctcccggcgttaccgtccctgacggggctgacgcagcgtcagctccagctgtctatggatccgatgctcgaccggatgggcatgcaggcgctgatggagaagtatggcgaccaggcgatggccggaatggatcacggcatgatggggcatggcgacatgagcgacatggggaatatgcatcacggcgacatgagcatgaaccacggatccggcatggagcatggcatgtcgtcaggcaagggctttgatttccataacgccaaccgcatcaacggcaaagccttcgacatgaatgagccgatgtttgccgccgccagaggccagtatgagcgctgggtgatttcaggtaagggcgacatgatgttgcatccgttccatatccacggcacccagttccgtatcctcagcgaaaacggcaagccgccagcggcgcatcgtcgcggctggaaagacaccgttcgtgtggaaggggacgtgagtgaagtattagtgaagtttgatcatccggcgccgaaggagtttgcctatatggcacactgccacctgctggaacatgaagacaccgggatgatgttggggttcacggtttaagtctctgcgacctgctgcgatccccaacgggaagaaggacggaacaccaaaaaaaacggcaactttcgttgccgttttgcgttttatttggcgtcatccgggagcgcataggcgacaatataatcgcccattttggtaccgaacgagccgtgaccgccggcagagatgacaacatactgtttgccattcacttcgtaggtcatcggagtcgcctgaccgccggctggcagacgggcttcccacagcttctcgccgttgctcatattgtacgcgcgcaggtagttatctgcagtcgcgccgatgaacaggacgttaccggccgtggagatcggaccgcccagcatcggcatccccatggtaaacggcagtttaaccggcatcgggaacggcaggctgtcctgcggagtaccgatacgttttttccataccacttcgttggttttcagatccagggcggagatatacccccaggccggctgtttgcacggcaggccgaacggcgacaggaacgggttcagcgttacgccgtacgggacgccgtactgcggctgcacgccggactccgtaccagagcctttcgcatctttcggcggctccatcggattgcctggcccgcgcgggatcagttttgagacgaaaggcagcgccatcgggttggcgatagccacctgacggttcggatcgacggagataccgccccattcaaacatccccaggttacccgggaacaccagcgtgccctgctcagacggcggggtgaagataccttcatagcgcagctggtggaagatcacgcggcacaccagctggtcgaacatagtggcgccccacatgtccgcgccggtcagatctttcttcggacggaagctcagatcggagaagggctgggttttggtaacgtaatcacctttggcagcgccctgcggaaccggtttttcaggcgccgggaccaccagctcgccgttacgacgatccagcacgaagatgttgccggttttcgctggggcatagatgaccggtacggttttgccgttgacctcaatatcagccagcgtcggctgggaaggcatgtccatatcccacagatcgtgatggacggtctgatagctccaggccagcttaccggtggtggcgttcagtgccacaatcgagctggcataacgctcttgctccggcgtacggttgccgccccagatgtccggagtggtcacgcccatcggcagatagaccagatccagcttagcgtcgtaggcggcaggcgcccatgagttcggcgagttgagcgtgaagtgatgttcatcgctcgggatggcgttcggatctttcgcacccggatcgaaggcccacagcagtttaccggtattcacatcaaagccgcggatcacgcctgacggctcgcgggtagagaagttatcggtgaccgcgccggcaatcacgatggttttatcggtgatgatcggcggtgaagtgggttcatacatgcccggcgtggtgaccggcatgttggtctgcagattgagaatacctttattagcaaaggtttcgcacagcttaccgttgtcggcgtttaccgcgaacaggcgaccatcgttcaccggcaggataatgcggcgcggacagtcggcgacaacgtcggcaggggcgttatccgctttcgcttcgtgataagaaacaccgcggcaggtgacgtgctggaacgacggatcggcgttcagctgcgggtcaaaatgccacttctctttaccggtggcggcgtccagcgcaaacaggcgctggtgagcggtacacaggaagagcgtatcgccgactttaatcggcgtcacttcgttagtgatttcacccggatcgttcggctgtttcaggtcgccggtgcggaacacccaggcttccttcaggttcttcacgttatcggcgttaatctgcttcagcggggagaagcgctggccttcctggttacggccataggccggccagtcgccgtcggcgacggtggaaatcggtgcggccggcgtagcgtcggcgctcagggtgccgttgacttcctgcgggtcgttaaaaccagcccaggtcagcatgccgccgctgatcagcagggcgacgaccagcgcgccaacggcgccagcggaaggcaccggcagacgacgccagacaaagggtaggatcagccagatgccaaagaagacgaggatatcgctacgcggcgtcaacgcccagaagtcgaaaccaacttcccagacgccccagatcatggtcgccagcagcagcgcggcgtacagccacagcgcagcgcgcttgccgcggaacagcattacggtcacgcccagcatcaccagcccggcgatagggtagtaccaggagccgccaagcacgaccagccatgccccgccgattaatagatagaggccgcagaacgctgcaaatagcgcagtcagcgtcaccaggagccttgattgttgagactttgtttcagccataaaaagttactcatgtgtttgttaaattttttaactgcaattaattataggatttaacaagtgtgatcggaatcacaaatatggctttattaatccctgcaccgaagatttctttttgctggtatactggatggcttgccggtcatcgtcggggcgaaagcagcggctttgatgatttatatttagaatcaaatggttagtattatgaaacatactgtagaagtgatgatcccggaatccgagatcaaagcgcgtatcgcggaactgggtcgtcaaatcaacgaacattatcagaacagcggcagcgaaatggtgctggtggggctgctgcgcggctcgtttatgttcatggccgacctgtgccgtgaagtgcaggtgccgcatgaagtcgattttatgaccgcctccagctacggcagcggcatgtccaccactcgtgatgtgaaaatccttaaagatctggatgaagacatccgtggtaaagacgttctgatcgtggaagacatcatcgactccggcaataccctgtctaaagttcgcgaaatcctcagcctgcgcgagccgaaatcgctggccatttgtacgctacttgataaacccagccgccgcgaagtgaacgtcccggttgaatacgtcggtttcgcgattccggatgagttcgtggtgggctacggtatcgactatgctcagcgctaccgccatctgccgtatatcggcaaagtcaccctgctggacgagtaaggggatatcccactctggacagcgcgcgccgcgctctccagggtggcgaagtctgaaggctatctgtgattgatgtgcttgatcttgaggttggagatcccgtggcgatagcgctgttcgagggtttccctgctcacagcggtgacatccagatcgcgcagcagtccgtcgtgaatcccgtaagcccagccgtggatggtcaccttctgtccgcgcttccacgcggattgcataatcgtcgaatgtcccagattgtacacctgttccatcacgttcagttcacaaagggtatccagacggcgctcctctggcatttcaccgagcagcgagctgtgcttaaaccagatatcgcggatatgcagcagccagttgtcgataagcccgagctccgggttctccaccgccgcctgcacgccgccgcagccgtagtggccgcagataataatgtgctcgacttccaggacatcgacggcatactgcaccaccgacagacaattgagatcggtgtggatcaccaggttcgctacgttacgatgcacgaacagttcgccaggctccaggccggtgagtcgctcagcgggaacgcggctgtccgaacagccaatccacaggaagcgcggtttctgcgtctgcgacagtttctcaaaaaagccggggtcctcttccaccagcatttttgaccatagtgcattgttgctgatgagtgtatctatatcattcatggacgttatcggcctgtaaccaagtaagtgcgttgcgctaatatagggtaagctcaccttttttaaaaccatcttaacccgtgatacttcaggctgcagatgcgttggcggcgtcagcgccggtccagcgcaaacgtgagtcaggcgggttaatgacgtgtcacgacacgagaagagatatttaatgaccattgctctggaattaaaacagctcaaaaaaacctatcccggcggggttcaggcgctgcgggggatcgacctgcaggtcgaagcgggggatttttatgccctgctgggcccgaacggggccggaaaatccacgaccatcggcatcatcagctcgctggtgaacaaaacctctggtcaggtcaatgtctttggctacgatctggagaaagacgtcgtcaatgccaagcgccagcttggcctggtgccgcaggagtttaacttcaacccgttcgaaaccgtgcagcagatcgtcgttaaccaggcgggctactacggcgttgagcgtaaagaagccctttcccgcagtgaaaagtatttaaaacagctcgacctgtgggaaaaacgcaacgaacgcgcgagaatgctctccggcgggatgaagcgccgtctgatgatcgcccgcgcgttgatgcatgagccgaagctgctgatcctcgacgaaccgaccgccggcgtcgatattgaactgcgtcgctcgatgtggggctttctcaaggatctcaacgatcgcggaaccaccattatcctgaccacccactatctcgaagaggccgaaatgctatgtcgcaacatcggcatcatccagcacggcgagctggtggaaaacacctcgatgaaagcgctgctgtcgaagctgaagtcagagacctttattcttgacctcgcgccaaaaagcccggtgccgaagctcgaaggctaccagtaccagctggtcgatacctcgacgctggaagtggaggttctgcgtgagcagggaattaacagcgtcttcgcgcagctgagcgcccagggggtgcaggtactgagtatgcgtaacaaagctaaccgtctggaagagctgtttgtcacgctggtgcatgagcgaaaaggagaatcagcatgatgcagctttattgggtcgcgctgaaaagcatctggaccaaagagatccaccgttttatgcgcatctgggtacagacgctggtgccgccggtgatcaccatgaccctgtatttcgtgatctttggcaacctgatcggctcgcgcattggtgagatgcatggttttacctatatgcagtttatcgtcccaggcctgatcatgatggcggtgatcactaatgcttacgccaacgtcgcctcatccttcttcagcgccaagtttcagcgcaatattgaagagctgctggtggcgccagtgccgacgcatgtgattattgccggctacgtgggcggcggggtagcgcgaggactgtgcgtaggtatcctggtgactgcggtgtcgctattctttgtgccgttccaggttcactcctggctgtttgtcgccctgacgctgctcctcaccgcggtgctgttctcgctggccgggctgctgaacgcggtgtttgccaagaccttcgatgacattagcctgatcccgacctttgtgctgacgccgctgacctatctcggcggggtgttctactcgctgaccctgctgccgccgttctggcaggggctgtcgcatctgaaccccatcgtctacatgatcagcggttttcgcttcggcttcctcggtatcaacgacgtcccgctggcgaccaccttcgccgtgctggtggtgttcattgtcgccttctatctgctgtgctggtcgttaattcagcgcggtcgcggcctgcgtagctgatactcatcatggttagcgcttcctgaagtaaatatgcgaagcgctaaccgcttatctttgactcccatcaccgatacgtcatcttcaccttgctacattattcgctggctaaggagggaagcatgctcggatgggtcattacctgtcacgatgagctggcgcaggagatgctggatcgtcttgaacaaaagtttggtccgctggcccagtgccgggcggtcaattactggcgcaatctcagcagcaatatgttgagccggatgatgtgcgatgcgctgcatgccaccgactccggggacggggtcatttttctcactgacaaaaccggtgcggcgccttatcgggccgcggcgctgatgagtcacaaacatacccactgcgaagtgatctccggcgtcagctatccactccttgagcgaatgtatctcctgcgaggcacgttaagcagcgtggcgtttcgccaggcgatcgtcagcgcgggcgggccgatggtgagcagcctgtggcatcagcagcagaagaacaccccgttccggttgcgccatgatgcctggggaaattaagcagtgggacagataccgcttttgttacaataaccgccgttgatggtataacggtttgatgcgtatgcttgcccgatttttgaccctgcttcttttcctgacctcactcagcgcctccgccagcctgcttagccagcagggcaaggctgtgcgctatatgcaaaccaccgaagacgcggtcatctgggcgcaggtgggaaaccatgtggtcagcgtcggcaatgttcgtgccgggcagatcctcgcagtcgtcccgacggcggctgactactatgagtttcgtttcggctttggcaccgggtttattgataaagggcatctcgagccggtgcagggcaagcagcgggtggaggaccgtctgggggatcttaataaaccgctgagtaaccaaaatttactcacctggaaagatacaccgctctatgacgctccctcggtaagcagcgcgccgttcggaacgctggccaacaatctgcgctatccgatcctcagcaagctgaaggaccggctcaatcagacctggtttcagatccgcattggcgaccgactggcgtgggtcagtagtctggacgcgcaggaggatcacggtattcccgtgctgacctatcaccatattctgcgcgatgaagagaacacccgttttcgtcatacgtcgaccaccacctcggttcgcgccttcacgaatcagatgacctggctgcgcgatcagggctataccacgctgaccctgtatcagctggaaggctatgtgcgtaataaaatcaatctcccggcgcgggcggtggcgatcactttcgatgatggcttgaaatcggtgaaccgctacgcctatccggtgctgaaacagtacggtttccatgccaccgcgtttattatctcctcgcgtattaagcgccatccgcagaagtgggatccgaaatccctgcagtttatgagcatttccgagctacgccagatccaggacgtctttgatattcagtcgcatactcacttcctgcatcgggttgacgccggccggcggccaattttattcagtcgcaattaccataatattctgtttgatttcgcccgctcgcgccgggcgctgagccagtttaatccgcacgttctctacctttcctatcccttcggcggctataacgctacggcggtgcaggcggcgaatgacgccgggtttcatatggcggtaacgacggtgcgtgggaaggtgaagccgggggacaatccgtttctgttaaagcggttatatatcttacgcacggattcgctggagacgatgtcgcggctgatcagtaaccagccgcaggggtaataccgacgctgcgcctgagcgcagcgtcgcggccatcaggcgacctgtaccggaatagctttcgcctggcgcttcatttcgttgtcgccttcgaagtaggcgatgttaggctgccagctgcgcgcctcttcgtccgacatggtaacgaagctggcgatgatcaaaatatcgccgacgctggcgcagtgcgcggcggcgccgttaacggagatgatccgggagccccgctcggcggcaatggcgtaggtggagaaacggttgccgttggtgacgttccagaggtgaatagtttcattctccagaataccggccgcatccaggaagtcctggtcaatggcgcaagaaccttcatagtgcaggtccgcctgcgtgacttttacgcggtggagcttgccctgcagcatattacgcatcataacttctacccttcaaccttaatgtagcagagcggacacggcgcccgccctgagaaaagcccgggcagtattgcccgatttttacccgctgtctactgagcgagcgtgacgatccggttgtcgatcaggcgagcctgccccagccaggcggccatcaggatcaccgcgcgctggctggcatcggtcagctcaagcagggtgtcggcatcgcggatctgaatgtcgtcggcgcggaagcctttctcattcagctcctgttcagcgatagcgatgatctcatcgagctgccgatcgccggcggccagcttttccgccaccgcgctcagcactttatacagaccaggcgcgattttgcgctggtcggcggtcaggtagccgttacgcgaactcagcgccaggccatctttcgcgcggacgatcggcacgccgatgatctcaatgtcgtagcccatgtcggcgaccatcttgcggatcagcgccaactgctggaagtctttctcgccgaagcaggcgacgtctggttgaacaaggttgaacagcttactgacgatggtcgacacgccgcggaaatggcccgggcggctggcgccttcgagcatggtggataatcccggaacgtcgacgtaggtctggccttcagtaccctgggggtacacttccgccggcgtcggcgcgaagacaaagtcgacatgacgtttgttcagcttttcgcaatcatcctgtaaggtgcgcgggtagcgcgccaggtcgtcgacgcggtcaaactgcatcggattgacgaaaatactgaccaccaccacgtccgcactggctttggcttcatcaaccagcttcatatgaccatcatgcaggttgcccattgtcgggaccaacgcgatacgcttaccttcctgacgcagacggcggatatgctgccgcagcagcagtacggattcaataatcagcacaacaagactccttaatggaaactgtgttcttcgcccggatagactccggattcgacttcggcaatatactgccgcaccgcggcgcggatgtcgcccgcttcggcaaggaaattcttggcaaatttaggaatgtggccgccggtaatgccgaaagcgtcatgcatcacgaggatttgcccgtcggtgacgttgcccgcgccgatgccgatcactggaatggtcagagcgtcggtgatgcgcttcgccagttcaaccggcacgcactccagtaccaacagctgcgcacccgccgcctccagcgctaacgcgtcttcaaacagggtctgcgccgcatcgccgcgaccctgcactttatacccaccgaatacgttcaccgactgcggcgtcaggccaagatggccgcaaaccggcaccgcgcgctccgccagcatcctcacggtgtcggccagccaggcgccgccctcgagtttgaccatattggcgccagcgcgcatcacgatggcggcatttgcaaaggtctgctcgggggtggcataggccatgaacggcaggtcggcaagcagcaggctgtttggcgcgccgcggcggacggcgcgggtgtgataggcgatatcttccacggtaaccggcagggtggagtcgtgaccctgcaccgtcattcccagcgagtcgcctaccagcagcacatttatgccttcatcggcgaacagcttcgcgaagctgtgatcgtaggcggtaatggtggcaaagcgcttcttttcctgtttgcatttctgcagcagggcaatggtggtcggtttcataacatttcctgatgatgaaagtcatattaaccggcattctaacagcagcattcagaggggcaatgattttgggcaaccgattacgacgatcgccgcaaatgctaaaaaagggagaggggattaccagctggcgggcttttccgcgccgagattatccagcacggcgcgcagcgccgggccgtcaggaaagtgaaggtccggggcgatctcgaacagcggccagagcataaagccgcggtttttcatatcgtagtgcggaacggtcaggcgctcgctgttaatgacagcatcgccaaacagcatgatatcgaggtccagcgtgcgcggcccccagcgttcggctttgcgcactcgcccctgctgcagttcgatgcgctgagtatgatcgagcagcgtctcggggggcagggcggtttccagcgcaacggcggcgttgagatagtccggctgatcctgcgggcccagcggcggcgtgcggtagaacgaagagacggcgaccacgcggctgtgcggaatttcgcccagggcgcggatagccgcctgcacctgctccagtggagaagcaaggttgctgccaagagcgatatagaccagagtcatgcgctaccctggcgcggtgcgcgcttgcgcggacgacggtgacgacggcgcggcgccggatcgtccccgaggtcgttgagcatatctttttgcgccggcggcgcggcgacctggaattcgccccaccatttggtcaggcgctgcagttcgtggttgttctcggcgccggcgcgtagctccagcaggtcataggcggcgcggaatttcggatgctccatcagcttccaggcgcgtttgccctgacgacgggacatgcgcagctgcagctgccagatatcacgaataagggtggtgatgcgcttagggatcgccagcgtacggcaggcttcgtccagcacatcgttcatcgccagggcgaaggcgtcgtagtacgccaggccgctctcctgagcgattttttgcgccgtctccagcagcggataccaaaacatcaccgcgaagaggaaggccggattgacgcgcatatcgttatgaatgcgggtatcggtattcttcagcacctggctgatgatccgctccatcgggctgtcgccgcgctcggtaaagtagcgggtgatggtcgggaacagcggctggaacaggctgtattcccgcagcagcatgtaggtctggtagccatacccggcctgtagcagcttgagcacttcttcgaacagacgcgccggcggcacatcgtggagcagggcggccaggcgcggcagcggttcagccgtttccgggctgatggtcatattgagcttggcggcaaagcgcaccgcgcgcagcatgcgcactggatcctcgcgatagcgggtttccgggttgccgatcagacggatcacgccgtcctgcagatccttcatgccgccgacgtagtcgcgaacggtaaagtccgccacgctgtaatagaggctgttgatagtgaagtcgcgacgctgggcatcctcctcgatcgagccgaagatgttatcgcgcagcagcatgccgttctggccccgctgggaggtgacgcgatcggtggtatgcccttcgtgatggccacggaaggtggcgacctcaatgatttccggcccgaacatcacatgcgccaggcggaaacgtcgcccaaccagacggcagttgcggaacagcttgcgtacctgatccggcgtggcgttggtggtaacgtcaaaatcttttggctttttgccaagcagcaggtcgcggacgccgccgccgaccagccaggattcgtagcccgccttgttgaggcggtacatgaccttgagggcgttttcactgatatctttgcgggaaatagcatgctgctcacgcgggatcaccgtcataggcgttggttcgacggcggcttctgcctcgcgctcctcacggcttagcaccttacggcaaaaattagcgactcgggtaaaaatggtgcacctcgtagtgtcagacggacttcagatcaactgtacagtgtaaaaatagcggctaatcatagctcagcgggagccatttgagaatgctcgattttcgccggctgccagttggcgacggcctgggcgagtaaatcatcgatgctcagggcctgccactcctcggggatcgcctgattcagaaagcggagcgcccggacgatttcggggcgcggatcgccttccggcagcgccggcgcgtggttttgtttagagagtttattgccgtcgccattgagagccagcggcagatggaggtaatccggcgcctgccagccaaaatgctgatacagcgaaatctgccgcaccgtcggctcaatcaggtctgcgccgcggacaatctcggtgatcccctgaaagtggtcgtcgaccaccaccgccaggttgtaggcgaacagcccgtcgcgacggtggataataaaatcctctcgcgccagcggctcattggcgatgagcgtgccgcgcagacggtcgctaaactgcagtaccggacgggtttggcgcaggcgcagcgcggcgttttccgcccccagcccgaggtcgcggcagtggccgtcgtagatcccgcccacggcgtggatccgcgcgcgggtgcaagtgcagtaatagctcagcccttgctcgcccagccacgtcagcgcctcgcggtaggcttcgtgccgttgcgactgccacagcacgtcgccatcccagtgcagaccgtagtggtcaagctggcgcaggatggtatcggcggcgccggggacttcgcgcggcgggtcgatatcttcaatacgaacacgccagataccctggttcgcgcgggcttgcaggtagctgccgagcgcggcgatcagagagccgaagtggagttcgccggagggggagggggcgaagcgccctatatagcgtgagtcagtcatggtacggacaacagaaccaggcgggagagactcccgccagagagtgaggcagcaggggattagcccgccatctgtttttcgcgaatttccgccagggttttgcagtcaatgcacagatccgctgtcggacgcgcttccagacggcgaatgccgatctccacgccgcaggattcgcagtagccgaagtcttcgtcttcaacttttttcagcgttttctcgatctttttgatcagtttacgttcgcggtcgcggttacgcagttccaggctgaactcttcttcctgggcggcacggtctaccgggtccgggaagttagctgcttcatcctgcatgtgcgatacggtgcgatccacttcatccctgagttgattacgccatgcttcaagaatacgcttgaagtgcgccagctgggcttcgttcatatactcttcgcccggtttctcttggtacggctccaccccagcgatggcgagaatactcagggacgatgttttacggttttgcccttcttgcatgttgcttctccttaacacgcactatcgatccccatgtgggggaaaatcaggccgctataaatagcagatgcttttccggatagcaattatctaaacgttacacttgacaaccctgtgaagaaaagcgtattcgcgcttgcgacccgaacactatttagccacttatttaccggggtttaacaccacggcgatcggcttattcagagtcatcctcgtcgtagaaagttccgctttccaggcgagaatttccacccccttgtcctgggcttctgttaacagctgtgcgtatctggcatcaatatgatgcgcgggagaaaaacggtcaattgccgaatgcaggacggcaaataaaatcaccgcgcggtcgccatttgccgcgacggccatcagttcccgcagatgcttctgaccgcgcgtggtcaccgcatcgggaaaataaccgtattctttctccgccaacgtaaccgatttcacttcaatatagcagttttgtcggtcatctgcctgtaacataatatcgatacggctattctcttcgccatatttcacttcgcttttcagctggttatagcctgaaagttcaggaattattccggcggaaatcgcctctttcgccaaagaattcgcgcgcagcgtattgacgcaaataactgcgccctgctgggtttcagttaattcccaggtgtgggcatatttgcgcttcgcattgtccgaggtggaataccagacggtgtcgcccggggcggcgcagccggtcatcgctccggtattcgggcagtggagcgtcagctcgcggccatcgggggtgaccacgtcagcaagaaatcgtttgtaacgtttaagcaaaatggcgggctgcaacggcggatcaaactgcatcaactttccttatcaaacggataacgttccagcgccgtgtagcgcgtgcgcccccggctaaagctggactcatagagcacgaactcgttcaccggaaatgtccagcgaaagccgggggccgggatcggcaccgcccggcgagcatcgcgccacagggtaatatgcgggtgaaacggctgcgggctctgatagcagccgctgcgcgccgcctgagcgcgcaacatgctggcgagctgcagcaggccgcgcggcggctggcgggttccgagccataccactcgcgaacgtagccactgtccggcatcgtccagcgtcagggtaaagcccggctggcgcagccggccagcgagagcggccagcgcccgctgtttttccgcgctcacctcgccgagaaacgccagcgtcagatgaagattatccgccgcgacgggcctgccggcatcttcggggaagtgcgttgcccgccactggacaatttgcttctggacggcagacggcagttcaagcgcaaaaaacagccttttcggctcagacatgatagagactcggtaatgaattagggggatgctacaatgcgaacccctgaatgttaacccccggagccttttgtgtcctcattgccggttgccgctgtccttccagaactgttatccgccctgcagcatgcgccgcaggttttgctcaacgcgccgaccggcgccgggaagtcgacctggctgccgctgcagatcctcgccgagggcaacatcgcgggacgcattatcctgctcgagccgaggcgcctggcggcgcgtaatgtcgcgcagcggctggctgaactgcttggcgaaaagccgggggagaccgtgggtttccgcatgcgcgccgaaacctgcgtcggaccgcagacccgcctggaggtggttacggaggggatcctgacgcgcatgatccagcgcgatccggagctgacgggcgtggggctggtgatcctcgatgagtttcacgagcgcagcctgcaggcggatctggccctggccctgctgctggacgtccagcaggggttacgtgacgatctcaagctgctgatcatgtcggcgaccctcgataacgatcgcctgcagcgtctgctgccggaggcgccggtggtggtctcggaggggcgcgcttatccggtggagcgtcgcttcagcccgctctccgcgcaccagcgttttgatgaggcggtggcggtagcggtggcggagctcctgcggcatgaacagggatcgatgctgctgtttctgcccggcgtcggcgagatccagcgcgttctggaacagctgacggagcgcgtggcggaggatgtcattctctgcccgctgtatggcgcgttgcccttaagcgaacagcgcaaagcgatcctcccggcgccggccgggaagcgcaaagtggtgctggccaccaatattgccgagaccagtttgaccatcgaggggatccgcctggtggtcgacagcgcccaggagcgggtcgcccgctttgacccgcgcaccggcctgacccggctggtgacgcagcgcatcagccaggcatcgatgatgcagcgtgccggacgcgccggtcgtctctccccggggatctgcctgcatttgctcggcaaagaacaggcggaacgggcggcggcgcagagcgagccggagatcctgcacagcgatctgtcggcgctgttgctggagctgctgcagtggggctgccacgatccggccgcgctggcctggctggatcagccgcccgcggtcaatctggccgccgcgcgccgcctgctggaggcgttgtcggcgctggacggcgagcggctgtcggcgtttggccgcaaaatggcagcgcttggcaacgagccgcggctggcggcgatgctggccgccgcgcagaccgatgacgaggcggtgacagcggcaaagctggcggcgatcctcgaggagccgccgcgcggcggactggtggatttgggggccgtcttttcccgtcagcaggccaactggcagcagcgatcgcagcagctgatgaagcgcctggcccgccgcggcggccagcccgatgccgggctaatggcggggctgctggcgtcggccttcgccgatcgcatcgcccgccgccgcggtcaggaggggcgctaccagctggcgaacggcatgggcgcgatgctggacgccgacgacgcgctgggccgtcatgaatggcttatcgctccgctgctgctgcagggcagcgcttcgccggatgcccgcatgctgttggctctgccagtggaaatcggcgagctgatcgccgcccgccctgaactggcgaaaagttccgacacggtggagtgggatgaagcgcaggggacgctgaaagcctggcggcggacggtgatcggccagttggtgatcaagacccagccgctggcgaagccctctgaggcagagctgcatcaggcgatgctcaacggtattcgtgagaaaggcctcggggtgctcaactggacgccagaggctgagcagctgcgcctgcggctgcactgtgcggcgcagtggctgccggaagaggcatggcccgcagtggatgacgcttcgctgctggcctcgctggagacatggctgctgccgcagatgaacggcgttcattccctgcggacgctgaaggcgctggatctgcgtcaggcgctacaggactggctgccatggccgctgcgccagaagctggatcgtgagctgccgacgcactataccgtgccgaccggcagccgcctggcgatccgataccatgcggagaacccgccagcgctggcggtgcgtatgcaggagatgttcggcgaggccacgacgccggtgatcgccgagggacgggtgccgctggtgctggagctgctgtcgcctgcccagcgtccgctgcagatcacctgcgatctgagcgccttctggcaagggagctaccgcgaggtgcagaaagagatgaagggacgctatccgaagcacgtctggccggacgatccggccaacgccgccccgacccgccgcagcaaaaaatactcgtagccgccgctgccgggcggcatcctgcccggccagtcggttcgcaaacgctagaccatctgctgccagagaaaaatactcccgccggccagcgccagccaggggccgaaggccagcggctgctgcagcgactgccgggtccacaggcgttgcagcagggtccacaccagcccgctggccgaagcgagcaacagcacctgcggcagaacctgccagccgcaccaggcgcccagcgccgccagcagcttaaaatcgccatagcccagcgcctctttcccggtcagcaggcggaacagccagtagaccgaccacagcgccagataaccggccatcgccccggcgaccgcatccggcagggcaatgtacacctcgttaagattgaacagcagcccggcccacagcaggggcagagtcaggcgatcgggcagcagctgggtccgggcgtcaatcctcgccagtatcagcaggaacgagagcagcaccaggccgcccgccagcggcaggcccggcgctagcaaagctccggcgaggataaacagcaggccggtggccagctcggtcagcggatagctccacgcgatgggcgcctgacagcagcgggcgcgacggcccagccagaggaaactgagcagcgggatattgtcccgccaggcgatcggctggcggcactgcgggcaggaagagcccggggtgctgagggttatccgctcgtcgtccgcggtctgggtcaacatgcgcggcagacgatagatcaccacattgtaaaagctgcccagcgccaggccgaacagcagtagaaagccataccagacaaagggaaagtgcagcgataacgcggctagtgtcgtcatttttgctcctgtggtaaccattttccctgcagctgccacggcgtcgggcccggggcgttattcgctgtcgggcgcgtgaccagcagcgccagcagcggcggcatcccctgccggggctgtagcgtgccgcgaaacagatagcggccatcgggcgacagagtcccctggccgctgaggctcagctgatgagagtcctgacggagagtcagcgccacggcgccgtccaccgtacagcggaaggtgccattaacctgggccagctccaggctgccgaccggagagtgcagtcgggcctgccgccactgcgcgcctccggcgatgatatgccggcagcgtccgtcgctgaaccgcccttcggtcaggctgaaggtgacctcccccgcggccttgacgggcatagtcgacatcaaccagcggctgagcaggctggcgggggcggtgagccgcccctcctgtaggcgcagatcgcgaaggccccacagccgggcctgacccatcacgccgcggggatcgctgagagagacctgccagcccgccagggtcagcgaccacgccagtcgttcaagccgttccccatgccagtagaccggttgcgccgcgccgcgccagacgctgccgctaaactgccccacctgtacgccgggcggcagcatgggggccagcaggcgcgccggagccgtggcggtgagccacaacagatagaggaccagcagcagtccgcccgcgatccagttagccttcatcgtcgcgctccagcagcagatggttgaccgtgacccagccgggtcgcgacggctgcccggtcacggacagcgagatcgcgttgacgccgcgcatcgccggagcgtccagccagtcgatcagcgcctggaaagcgcagggctgaagggtgatctgcagacgttttccctgcggctgcaggcggatgaccgtcagtccgtggctcgccgcctcgcgcatcaccagcgcggtgagcgcctcttttgccgccggcgcgggctgctggctgagctgctgcaggcgcggagcctgctccgtcatccagcgcaggctggcctgctctttcaccagggtttgccgccactgcgcctcgcgggctcgccagggctgccacagcccataccagaaggcgcatgccgccagcagccctgtcagaccaagcaacaggcgctgctccgacggcgtgcgctgccgccaccagataagcagattagccatcgttttcctccagcgtcagttgtccctcaatgccatccggtttcgtgatcatgtcgcccggccggacgcgaaaccgcggctgcgcccgctgggtaaactgctccagcgcccgggaagtgaccgcggcgatatccagctgcagacgattgcccgcggcatcccagctcagcgctcgcagacggatccccggcgtttcgctgaggatgttttgcaaggcgctgaggcggtcgacgaggggggcatgctgcgcctgacgggtgagggtttgcaggtgctgctgcatctgcagtcgtgggttaatcacctttttctccgtcggaaaccagcggtgatagaaggcccggctggcctgttgcgccgcctcggcctgacgcgccagatcgcgatggtccagcacgctgtttgcccctgccagtaacgccagagccagcgcggcataccgcgccggacgccagctcgcctgcgcagaccgccgccggacggcgaactccccctgcagcagactgagtttctgcgctgccggatggcgtgcggcaagggtcagcaatgtctgcgcaggctgctcccgccagacgcccggcgccgcgggcggcggcgaatagctgtcgatgacgtgctcttccgcctcgctctgcagcagctccgtcagccagacgttttccgccgccatgccgccccacggctggtggcggatcagccactgctcgtccacctgcaccgcgctccacgccggcggttgccagggcagggccagcacgtcgggcgtcaacgccaggggctgtaaggagagcgattcgcagcgcgccagccagtcgcgcattttttgccgctgtacggcgacgatctcgcactgggcctgctggcggtggagcagagcaaaatgggtggcttccacatcgtctgccagctgctcttccagcagaaacggggccacctgcagcggcggtttacgcaggcccgccggtaggttgagcgagtgaaacgcgcagtcgctggccgggatcagcacccaggccgggtactgctcagccagcgccgggaaagggctggcgtcgtcagtcggccaccggccgctggcctcgtggtgcggctcgccgggggcgaagagttgccagtgcagcggcgcctgcgcggcggcgaggcgcacgatcagcatggcctggggagaagcattaatcttgttcatcgaccaccatagagagtccatatcgccgctggacgacggtaaacgtgcgccccgattgttgcaggacgctgtacagctgaaagcggagattgccagtcaccacggtaaaagctgcgataaagcgtgcgctgtgcaccgtcagccagggacgggcaagcgtggtatcggttttctgcagcgtcggctgcgcgagaaaggcggcgacgctgctccacccggttcgcgggcggttgtgcagcagctgttgcgcctcctgcagcgtcagatcgccgggaaagagggccaccagcagggcggcctgggaggggcgcagggtgttgacattgacctgcagcgcgtcatccggctggacgcagacgaaggggagcaggcgctgatagagcgcggcgtccatcccggccagcaggcgcaactcgctgacatcctgcatcggctggttggcggcgagatagcccggggtttgcgccatatagacctcgtcctccgccccgttcagccgcggctggccgtcgctgtccgtccagtcgccaagggcggcggcgatctggctggcgcgcagcggcggctcgccgagcagcgccagcagccgaacgaagacgtcggtcgggtagggcgttccgtcgccagcctcatccgtgcgatggttgatggcattgaggttaaagcaggcgtgcccgtcgcggatcgtggcgcggatttcgccatcgtcgagggtaaagcggcgcccctcctgcgcccaggtttgcgccaggttcgtttgactgggcgagtccagcgcatcgcgttgcagcagcgcggcggccatattttccgccgccagggcgtaccatctggcctgcaaattatcgagggtcacggcggtatgctgatacatgaccgcggtgcgctcggtcatggcgctggcgaggatcatcatcagggcgaggatgaacagcaccatcaggagcgcgacgccgcgttgccgatttatcactggccgcctcccggggtgagtaaaaacaggcgggttatctccccgctgttcgccagcgtcagggtgatctccagcccctgcggcagcctctgcgggcggtcccaggtttcctgccagcgcccgtcggcgtaaaaccgcaggcgaaacgctgtgacctcgcgcagcagcacccggaccgtcggctggctgccggtcagcggatcctgttgatcgaagctcagacgttcaaactgctgctggcgcagacggtagctgacgttctggatctccgagcgcgggaggatccccagcgggtttggccagccgctgcggctgaaggccagtccccagtcgtcgctctgcaactggaaacgtccggcgaagaaaaacgtgtcgctgtttctggcgcgacggggaatgatgtgggtgacatcgtcggctatctggcgaaaggcgcgctggagggccgcgatctgctggcttttctcgcgggtcaggccatcggcgcggatgacgttctgcagcaccatcacggcggcggcgctgaggacggcgaggatagccagcgccagcagcgtttcgatcagagtgaaaccgcgtattttcgttatcatggcggcgtcacccaggtgcgcagggtggccagcggcgcgggatcgcttttttgccgccggacctccacgtccagcgcccgcagctgcggcagcgcggtttccactccctgccagcgaacgaaccagcgcgtcccggcggcctccacggtggtttcagaccagctgagggcaggccagcgtttctccagccgcagctgcaccagctggttatccgccagccagctggcgaggattttctcttccatacgcccgagctggcgcgtctgctgcagggtggactgcatcaccgccaggccggcgagggcgaaaatcaccagcgcgaccatcacttcgataagcgtcattccggcttcacgcttcatggctgctcccgcgccgccagcggctggctgtcgccctgggcgtcgacgttgatgcccatcgcggcgtcaatccgcagctgaaacggcgtgacttcaccgccgggaaaaataagcacgtcgggctgctcgcccggcgtccacgcctggccgtcgggaaagcgcagcgtcagcctggcccgcgggagggtttccgccgtggtgacgcgtccggcctgcagcggcagccactgcgcgttgccccaccggtcgtcagccgccgccggggcgctatcgtcggcaggctgcaggcgcataaactgccagcgctcagggtggatgataatgccgaagagctgaccggtttgctgcccgcgctcgcggacaaaatccagttgcgcctgaaagcgcgccaggatctgtgtggcctcctgggtgcgggcggagggaaacgccagcagcaccatgctggcgctgacgccgatcagcagcaggaccagcatcatctccaggagggtgaaaccgcgctgagacactatttcttcccgagggtccagttgccgatatcgtcattggtgtcgggcatcccgtccgggccgacgctgaagacgtcgatggcgccatgctgacccgggcttaacagctgatactcatttccccacgggtcctgcggcagacggcggatatagccgccttccgggtagttgcgggcatgcggctcggcggccggagcggtcaccagcgcctgcagtccctgctcggtgttggggtagcggctgttgtcgagtttatacatgtccagcgctccctcgagcgccaccagatcgctgacgactttctggcggtccgctttctccttgttgcccatcaggttaggcaccaccaggctggcgagaatgccgagaatgacgatcaccaccataatttccagtaacgtgaaaccgcgttgccgttgcatagttttctccattaatacagttacatactcataagggtgttcagttgcaggatcggctgcaggatggccagcacgataaacagcaccatgccggccatggtgaccaccagcagaggctcaaacaggctgagggccatctggatctgcgcgctcagctcccggtcctggttctccgccgcgcgctccagcatggcggtcagttctccgctctgttcgccgctggcgatcatgtagcgcatcatcggcggaaacagggcggtggattccagcgcccgatgcagactgacgccttcgcgtaccgattcgctggccgccgccagctggctgcgcgcccaggcgttgctgaggacgtcggcgctgatgcgcatcgacagcagcagcggcaccgcgctggcattgagaatgcttaaggtgcgggcgtagcgcgcgctgttgacgctgcgggccacgcggccgatgaccggcaggcgcagcagcgcccggtcccaggcgagccgccgggcgggctggcgcagcagatagcgcagcgccagcagcgccagtaacgacagcagcgccagccaggggcccgcgctgcgcacgatgtcgctcaggctcattagcagccgggtagagaagggcagggcctgtttaagatggacaaactgctcaacgactttcggcaccacggtggagagcagaatggcgatcacgctgatagcgaccagcgtcagtacgatggggtagatcatcgcctgcagcaggcgggcgcggagctgctggcgctgctcggtatagtcagcaagccggttcagtacgccgtcgagatggccggaggtttcgccggccgccaccatggcgtagaacagcccgtcgaagcaggcgggataggcgcgcatcgcctccgccagcgagtggccttcgagcactttgctgcgcaccccggccattaacgttcttagcgacggcttttcgcactgctgggcgacggcatcgagcgccttttccagcgggatcccggcggcaaccagagtcgccagctggcgggtgagcagggctaaatcaccggcgctggtacgccgggtaagggatccgccggcccacagtcgccgcgccgggtcggcagttgtcacttccagcgccagccagcccttgtcccgcagcagctggcgggcgtggcgggcggagtcggcctgctgaaggccgcggcgggttttgccctgcgcgtccagcgcctgatagcgaaacagggccatcttagacgctttccgtcgtttgctgttcggtgacccgcatcacctcctcccagctggtgatccccgccagcgctttgtcgcgtccggcatgacgcagggtttgccaggctggccccagctgctggatcagggtgatctcgttctcgccgcggtggatggcggcgcgcacgcgatcgtcgattagcagcagttcatggatcccggtacgcccacgatagccgatgaaattacactccggacagcctttgggctgccacagccgcgcgccgaccgggaccgccatctgccgggcggtgttggcatccgcctgccagggctgacggcagtgcgggcacagttggcgcaccagccgctgcgacatcaccgccagcagcgaggtggagagtaaaaaaggctccacgcccatatcctgtagacgggaaatggcgcccagcgcgctgttggtgtgcagggtcgacagcaccaggtgcccggtcagcgaggcctgaacggcgatctgggcggtttcgccatcgcggatttcgcccaccaacactacgtccggatcctggcgcaggatggcacgcaggccgcgggcgaaggtcatctcgactttggcgttgacctgggtctggcctatgccctccagctcatactccaccggatcttcaatggtcatgatgttgcgctcccgggcgtcgaggcggctgagggcggcgtagagcgtcgtgcttttcccggagccggtcggaccggtgaccaggatgatgccgtgcgggcgggcgatcagcgcatcgacccgatcgagcagggcgggcggcatgcccagcgtcagcagatccaggttgacgctgtttttgtccagcagacgcaggacgacgcgttcgccgtggctggagggcagggtggagacgcgcacgtcgattgctcgcccgccgatgcgcagcgccatgcggccatcctgagggacccgcttttcggcaatgtccagactggccatcaccttgatgcgcgaaattaacagggcggccagccgccgctgcgggcgcagaatttcccgcagcacgccgtcgacgcgaaagcggatctgcagatggcgctcgtaggtttcgatatgaatatccgaggctttttctttgatggcctcggtgagcatggcgttgatcaggcggatgatcggcgcgtcgtcctcgctgtcgagcagatcgtcggtgtccggcagctcttcggcgagggtatagaggtcgagctcgttgccgatgtcggccatcatgcggtgcgcctccgccgaatcacgctgatagctgagcaccagcactttctcgaacgcgtccggcgccagacggctgacgcgcatcgggccgtccgccaggcggcgcgcttccagcagcgcccgggcggcggtatcggggcggcacagcgcttcgcagcattcgccgtcgctgagcagcacaagatggtgcgcgcgggcccaggcgaagggcaacagcggacggcgttcggcggctggcgtcatgggcggcctccgagattgaaggcgtcaatggcggcgctgacctggcggaaggcctgggtctcctgctgcggatagatgtgcagcaggtcgttgctgagcgacgcttcgctgctttctttaccccgctgtttagtttgcgcattgttgaaggcggtgtactggccggaagaagcctggcggtactcatcgcgatcgcgaatgatggtcgggcggataaacagcatcaggttgcgtttcgacactttcttgctgtcggagcggaacagggcgccgatcaccggaatatccccgagcagcggcactttgtcagcggtatcggtgacggttttatccagcagcccgccaaccaccaccgtttcgccgctgccgaccagcacggcgttattcaccgtccgggtattgaaggtcgccccgagatcgctgctggtgctggaggccgagtcggcaacgctcgatacctcctgctcaatctccagcagcaccgcatcgccttcgttaatctgcggcttcaccttcagtttaatgccgacggttttgcgctcgacggtattgaagatgttgtcgcctgaggtggtttgcgagccggttaataccggaacttcctggccgacgttaaaagtggcttgcatgttatcgagggtgacgatgctgggggtggccagaatatcgttcttggtactgctggagagggcggtgagcagcatcgcccagttcccctgatagaagccggcggcgataccgttaaacgagccgagggcgctggccagcgagctgctgatggtaccgtctttgttgtactggttggcgccggcgatagccgtcgatatcggcaaaccgctgttggtgaactgcgtcatgccggcgtttttgtttgcccactggataccgagattaaggccatcggcatcctgcacttcggcaataatcgcctccaccagcacctgcgggcggcggatatcgagctgggcgatcacccgctcaagatcgttcatcacgtccggcgccgcggtgacgatcagggcgttggtctggccgtgggctttgataataatatttttgtcgatcgcggccactggcctggcgctttgcttgtcgctctgcagcgagctgctgatcccggtcagaacctccaccagatcggcggctttggcgtacttcaggtagatcactttggtgttaccctgtaccgcctgctggcggtcgagctgtttgatcatggcgatgatgcgctggcgcgagtttggttcgccgctcaccagtaccgcgttggtgcgctcatcggccaccacgttcgccaccatcgagcccggcagcgccgacttgctggtatctttattaagctcggtaaccagtttgactacttccgcggcggaggcccaggaaaggggcacggtcaccacgctgcgatccccggcgttgtcgacgcgctcgacaatggtcagcaggcgtttgataaccgccgcgcggccggtcatcagcagtacgttggagggctcataatggaccacgctgccggcgccagcgttatcgttcagctggcggagcagcggggcgagatcgcgggcggcgacgttggtcaggggcaccacccgggtgaccacttcatcgccttcgcccggcgcggccgcgctggcgaccggcacggccgaggtcttggcgtctttggcgcggaccacttttagcacgccgttattcatattgatcacggcgaagccatatacatccagcacgctgaggaagaattgataatattgttcttcattgagcatatcgtaactgcgcacggtgatagtaccgcgtacgctgggatcgataatcaccgttttattcaggtttttgctgacggtattgataaattcctggatatcggtgcctttaaaactggcggaaaattcctccgcggcggccggagaaaatagcagcggggttaatatcagcagcgcaggcagcatttttcgcaggcttttcatggttggcaattattcatcccccagcgcgaaagcaatatcgtgtcgttggccttcccgctcaacggttagcgttatttcggtcatgtcggccagattctgcagcgcctgttgcgcttgctcctggtcgcgtaaatcgatgccatttaaggcaatcgccaaatcatttgcctgcaggccggactggcgaaacagcgaggcgtctttgcctgggtttagtcgataacccagcagtttgtcgccgctgagtaccggcgaaatagataaataagtgaggatattttgcggctgttcgcggagtcgcttcacgaggggcgggttgcccgcggcggtgggcggcggcgacggcgcgcgactgtcgttaaataataaaatggcctctttgcgcccctgatagttgacaatgatccggtcaggcagaatggcggcgatccgcgcatcataccctgggaggggatcgcccgtgctaaggctaacctgctgatttcccttttcgataatagcgatggagcgcgccgggttgctgctggcgagtagcccggccaggcgtagcttcaggctggaaaccggcacctgattgagactggcagcatccgttggcgtggggctatttttcaccgccaggccaaacagggtaaatgcgggccgcacattttttaattccggatctgccgccggaggcatggttaacggtagggcggaaatatcctcaggactcacagggaataccacgcgccaggttaatttcgccagctgtgggatagcggttattaatatgatgagcgtcacaatttgtggtaataatttaattatccctttatttatatttgttaacctcatcacagaaactggcattttaattcctttgctaatttatttttctgcacgttggcgtaataccctaccgaaacaggtaggtgattattggcttttgaattatttattgccggagagtggcgataagcgtggcgaatcataatcagtttgcggtttcgggtcgtcattccctttattgatttactcccccggcttcctacgccccccgctcatttgtgggggatgattgcgcctgggaaagcaaaaatatctaattagcgcgctgtaaagatattcatcctttcttaccttttataatttaataagcatattagggactatcgaatgctcagatatacctgtcatgccctatttcttggatcgttagtattattgagtggctgtgataacagctcttcctcttctacctctggctcaccgggttcaccaggcaatcctggcaacccaggcactcccggcacgcccgacccgcaggatgtcgtcgtccgcttaccggacgttgccgtcccaggcgaagcggtgcaggcttccgccaggcaggctgtcattcatctcgtcgatatcgccggcatcaccagcagcacgccggccgactatgcgacgaaaaacctctacttatggaacaacgaaacctgtgacgcgctgagcgcgccggtggcggactggaatgatgtcagcaccacgccgaccggcagcgacaaatatggcccttactgggtgatcccgctgactaaagagagcggatgcatcaacgttatcgtccgcgatggcaccaataagcttatcgacagcgacctgcgcgtctctttcagtgatttcaccgatcggacggtatcggtcatcgccggtaacagcgcgctctatgactcccgcgccgacgccttccgcgccgcctttggcgtggcgctggccgatgcgcactgggtcgataagactactctgctgtggccgggtggggaaaataaacccattgtgcgcctctattacagccacagcagtaaggtggccgccgacagtaacggcgaatttagcgataaatatgtcaagctgacccccaccaccgtcaaccagcaggtaagcatgcgcttcccgcatctcgccagctatccagcctttaaactgccggatgatgttaacgtcgatgaattgctgcagggcgagacggtggcgatagccgcggaaagcgatgggatcctgagctcagccacccaggtgcagaccgccggcgtgctggacgatacctatgccgccgccgccgaggcgctgagctatggcgcccagctaaccgatagcggcgtgaccttccgcgtctgggcgcccacggcgcagcaggtcgagctggtgatctatagcgcggacaagaaagtgatagccagtcacccgatgacccgcgacagcgcctccggcgcctggtcctggcaggggggaagcgacctgaagggcgccttctaccgctacgcgatgacggtctaccacccgcagtcgcgtaaagtcgagcagtacgaagtgaccgatccctacgcccacagtttgtcgaccaactcggagtacagccaggtggtcgatctcaacgacagcgcgctgaagccggaaggctgggacgggctgacgatgccgcacgcgcagaaaaccaaagccgacctggcgaaaatgacgatccacgaatcgcatattcgcgatctctccgcctgggatcaaaccgttcctgcggagctgcgcggtaagtatctggcgctcaccgcccaggaaagcaatatggtccagcatctgaaacagctgtcggcctcgggcgtgacccatattgagctgctgccggtcttcgatctggcgacggtcaatgagttcagcgacaaagtcgccgatattcagcagccgttcagccgcctgtgcgaggtcaatagcgcggtgaagagcagcgagttcgcgggctattgcgacagcggttcgacggttgaagaggtgctgactcagctgaagcagaacgacagcaaggataacccgcaggtgcaggcgttgaatacgctggtggcgcagaccgactcctataactggggctacgatccgttccactacacggtaccggaaggatcctacgccaccgatccggaaggcacggcgcgtattaaagagttccgcaccatgattcaggcgatcaagcaggatctgggaatgaacgtcattatggacgtggtgtacaaccacaccaacgccgccggcccgaccgatcgcacctcggtactggataagatcgtcccctggtactaccagcgtctgaacgaaaccaccggcagcgtggaatcggctacctgttgctccgactcggcgccagagcaccggatgttcgccaagcttatcgccgattcactggcggtatggaccaccgattataagatcgatggcttccgcttcgacctgatgggctaccacccgaaagcgcagatcctctcggcctgggaacgcattaaagcgctgaacccggatatctacttctttggcgaaggctgggattccaaccagagcgatcgctttgaaattgcctcgcaaatcaatctcaaaggcaccgggatcggcacgttctccgatcgtctgcgcgacgcagtgcgcggcggcgggccgttcgactccggtgacgcattacgccagaaccagggcgtgggcagcggggccggcgttctgccgaatgagctgaccaccctgagcgacgatcaggcgcgtcacctcgccgatctgacccgtctcggcatggccggtaaccttgcggactttgtgctgatcgacaaagacggcgcggtgaagagaggcagcgagattgattataacggcgcgccaggcggctatgcggctgatccgacggaagtcgtgaactatgtgtcaaaacacgataaccagacgctgtgggacatgatcagctataaagccgctcaggaggcggatctcgatacccgcgtccggatgcaggcggtgtcgctggcgacggtgatgctcggccaggggatcgcctttgaccagcagggctcggagctgctgcgctctaaatcctttacccgcgattcgtatgattccggcgactggtttaaccgcgtggactactccctgcaggacaacaactacaacgtcggtatgccgcgcagcagcgatgatggcagcaactatgacattatcgcccgggtgaaagacgcggtggctactccgggtgaaacggagctcaagcagatgaccgcgttttatcaggagctgaccgcgctgcgtaaatcgtctccgctgtttaccctcggcgacggcgcgacggtgatgaagcgcgtggacttccgcaatactggcgccgatcagcagacgggtctgctggtgatgaccatcgatgacgggatgcaggctggcgccagtctggacagccgtgtcgacggcatcgtggtggcgatcaacgccgcgccggaaagccggacgctgcaggacttcgccggcacatcgctccagctgagcgctattcagcaggcggcgggcgaccggtcgctggcgagcggcgtgcaggttgccgctgacggttcggtcacgctgccggcctggtcggttgccgttctcgagttgccgcagggcgagtcgcagggcgctggcctgccggtgagcagtaaataacataacgtagggcgcccgtaagggcgcctctggctgatgacaaacctgtttcgttattgtgctcgcctttctgtcgggtggcggctttcgccttacccggcctacgaaagattacaatatcaaacagttatgcagttatctgtaggcccgcgcaagcgtagcgccgccgggcaattcctgaagattgcactttgtcagcagtctggggcatccgtaagggcgccttctcgttatcgtgagggaacaggagacggttgtgattgttcgtgatgacagtgaaagaggcatcccgccgctggtgacgcatcagccgccgtcctcgatggatgatgcgccggtgatccgcggacggatggtgcagatccccggctggattatcccgctgtacgccggattatttatcgcgctcggctggtttggcggcgagcagtggcgtcacccggcaccgccgcaaacgctgcccttgccggtggcgcatgcggcgcttctgccgttaaccgctgccggagaggccgcgccaaagacgccgccgccggcggcaaaagccagcgcgcccgcggcgccggaagtggacagcgatacgctgccgcctctacgctacagcgcccatgtctatgcctcgctaccggaaaagcgcagcattgtgttaaacggcaaagcgtggacggagggcgattcacccctgcccaatctggtggtggagcagatccagcaggatgtgacgatcttcagcttcaacggcacgacctttaccctcgcggcgctggaggactggccgggcggaaaaattgacgaggagccgaaagaggaataaaagcgcgcacaataaccggcgcgctgaggatatttcgcttagtcgctgcgcaagctggcaataaatggcgcgagctgacgattaaattgactgcactgtgtggcttccggggtactgtcctgtaatagctgttggtaaagccggtcgctattttggcttaacgtcgccacgtcaatatttccccatccgcgcgctttaccgacattcaccgctgcccgatatatcgtttcatcagcggggagatcgctacgattacatttattcttgagatagcgcgtcccggccgccacggacgagagctgctcgagctgcgcctggctgctgatagccgggctgagcgttgaggcgggtttttgttggcagccagagagaagggctaccatgcaaagcggaaatataagcggaatacgcatcatagagtaatcaaaataatgaatcactggccgctagtttaacaaatatttccctggtgtcatcataaaatattattctgcataaatgttaacaggctctcatttttatcagcggaaaggcgcttaatcgactttacttttatcaataataaacgttggcgctgggaaaatatattttcatccgcggatgatgccactgcgttgaccggcaggaagcgcgccgttttttatgttattaaaaaacatactctttcccatcttgttacgtgcgcaggaggtaaaatgctggttaagaatgtcgcattttagtgctatcctgtatgccctgaacattacgtgctatgttctgacttattctgccgatgatgcgtttaacgcaatgattttatggtgaatttttattgttagtatcatgtaacatgaagcaaaccaaccctctgaaaggctggcggcgcgtcctgcctgccagcaggttgtcgtccgaaggataagcagcctggacgttaatttgagagatttcttcttcctctgaacaggggaagtattgagaatcaggcctttgcgcctgaacgttgcggagaaaaagcatggcgggagatgaccgcgagcctatcggacgtaagggaagaccctcacgtccgactaaacagaaagtcacccgtcgccgggtccgggaagaggactacgacgacgagtatgatgacgatgattatgaggatgagaaaccggtgccgagaaaagccaaaggcaaaggtggcaagcctcgtcggaagcgcagctggctgtggctgctggtcaagctggggattgtcttcgcggtgctgattgccgcctatggcgtctacctcgaccagaaaatccgcagccgcattgacggtaaagtctgggagctgccggccgcggtctatggccggatggtcaaccttgagccggacatgcagatcagcaaaaacgagatggtgcgtctgctcaacgccacgcagtatcgccaggtcagcgcgatgacgcgccccggcgaatataccgtgcaggctaacagcatcgagatgatccgtcgtccgttcgatttcccggacagtaaggaagggcaggtgcgcgcgcgtcttaccttcgacggcgaccatcttgagaccatcgagaatatggataataaccgccagttcggtttcttccgcctcgatccgcgtcttatcaccatgctgcagtcgccgaacggcgagcagcgcctgttcgtgaagcgcagcggcttccccgatctgctggtggataccctgctggcgaccgaagaccgccacttctatgagcacgatgggatcagtctctactccatcggccgcgcggtgctggcgaacctgacggcaggccgaacggtgcagggggcgagtaccctgacccaacagctggtgaaaaacctgttcctctccagcgaacgctcctactggcgtaaagccaacgaagcgtatatggcgctgatcgtcgacgcccgctacagcaaggatcgcatccttgagctgtatatgaacgaggtgtacctcggccagagcggcgataacgaaattcgcggcttcccgctggccagcctgtattacttcggccgtccggtggaagagctgagcctcgaccagcaggcgctgctggtggggatggtgaaaggggcgtcggtctataacccgtggcgtaacccgaaactggcccttgaacgacgcaatctggtgctgcgtctgctgcagcagcagcaggttatcgaccaggagctgtacgacatgctcagcgcccgtccgctgggcgtgcagccgcgcggcggggtgatttcaccgcagccggcgtttatgcagatggttcgtcaggaactgcaggcgaagctgggcgataaagtgaaagatctctccggcgtgaagatcttcaccactttcgactcggtggcgcaggatgcggcggaaaaagcggcctccgaagggatcccggttctgaagaaacagcgtaagctggcagacctggaaaccgctatggtggtggttgaccgcttcaccggcgaagtgcgggcgatggtcggcggcgcggagccgcagttcgccggttataaccgcgcgatgcaggcccgccgatcgattggttctctggccaagccggcgacctatctgaccgcgctgagtcagccgaatcagtatcgcctgaatacctggatcgccgatgcgccggtgacgattcgcctgtccaacggtcagacgtggtccccgcagaacgacgatcgtcgtttcagcggtcaggtgatgctggtcgatgccctgactcgctcgatgaacgtcccgacggttaacctcgggatggcgctgggcttgccggcggtagtcgatacctggactaaactgggggcgccgaagaatcagctcaacgcggtgccgtcgatgctgcttggcgcgctgaacctgacgccgattgaagtggcccaggccttccagaccatcgccagcggtgggaaccgtgcgccgctttccgcgctgcggtcagtgattgccgaagatggcactgtgctctaccagagctatccgcaggcggagcgcgcggtgcctgcccaggcggcctacatgacgctgtggactatgcagcaggtggtgcagcgcggtacggggcgtcagctgggggcgaagtatccgggcctgcatctggcggggaaaaccgggaccaccaacaataacgtcgatacctggttcgccggcatcgacggtagtcaggtgaccatcacctgggtgggtcgcgacaataaccagccgaccaaactgtacggcgccagcggcgcgatgtcgatttaccagcgctatctggcgaaccagacgccaacgccgctggtgctgacggtgccggaagacgtggttgatatgggcgtggacagcaacggcaacttcgtctgcagcggcggtatgcgttcgctgccggtctggaccacgcagccggatgcgctgtgccgtcagggcgaaatgatgcaacagcagcagttgcagcaacaggaagcgaaaaatccgtttaatcagtccgggcagcaaccgccgccgcagcagcaacagcagcaacagccgccgaagcagcaggaaaagagcgacggcgtcgcgggctggatcaaggatatgttcggcagtaactgattttgaccgcacgaccagaccccttaatacgaaagtattaaggggtttttttatgcctgtaaaaaagttaacggctctttaactccataataactatctggttattaattcagccttcgaccggcggcgacaggcatatcgcttgccttgccttcgacgtttcgcctattatatcgcccgtcataataataattctcgtttacgttatcattcactttcatcagagatatacccatggcgcgtccaaaaactgctcagccaaatcactcgctgcgtaaagtcgcagctgtagtagccacggcggttagcggcatgtctgtctacgcacaggcagcagaacaaccgaagcaagaagaaaccatcaccgtcgttgccgccccggccgcccaggaaagcgcctggggaccggcgccgactatcgcggcaaaacgctccgccacggcgaccaaaaccgataccccgattgaaaaaacgccgcagtctgtgtcggtggtgacgcgccaggagatggagatgcgccagccgacgacggtaaaagaggcgctctcctatacgcccagcgtcttctccactcgcggcagttcgaccacctatgacgtggtcaccattcgcggcttcaccacctcgacgaccgtcaacaccaaccagtatctggacggcatgaagctgcaggggaataactactctgaagtctccatggatccttacttcctcagagcgtgtggaagtgatgcgcgggccaacctcggtgctgtacggcaacagcaacccgggcggtatcgtcagcatggtcagcaagcgcccgactaccgagccgctgaaagaagtgcagtttaagatgggcaccgacaatctgtggcagaccgggtttgactttagcgacgccattgatgatgccggcgtttggtcgtatcgcctgaccggccttggccgcagtcaggatgcccagcagcagatggcgaaatcgactcgctacgcggtggcgccctcctttagctggcgtccggacgataaaaccgacttcaccttcctgagcaacttccagaatgacccggatgcgggctactacggctggctgccgcgcgaaggcaccgtggtgccgtattacgacgccaacggtaaggcgcacaagctgccgaccgatttcaacgaaggcgagtccgataataaaatctcccgccgccagaagatggtgggctacagcttctcccatcagttcgatgacacttttaccgtgcggcagaacctgcgctatgccgatgtgcatacgctctatcgttcggtatacggcaacggctatgtcgcgccgggctacatgaatcgcgcctacgtgcgctccgacgagcacctgaacaccttcaccgtcgatacccagctgcagtctgatttcgccaccggcgcggtcagccatacgctgctgaccggcgtggactactcgcggatgcgtaacgatgtggatgccgactacgggacggcggatcctatcagcatgagcaatccgcagtacggcaatccgaatattcaggtcaccttcccgtacgcggtcctcaaccggatggagcagaccggcctgtacgcgcaggatcagatggagtgggataaatgggtgatgaccctgggcggccgttacgattacgccacgacctcaacgttaacccgcgccaccaacagcctggcggagaatcacgaccagcagttcagctggcgcggcggcatcaactacctgttcgataacggcatctctccgtacttcagctacagcgaatcgtttgaaccggtatcgggttccaacagccgcggccagccgttcgatccgtcgcgcggtaagcagtatgaagccggcgtgaaatacgtgccgaaagatatgccggtggtggtcaccgcggcggtttatcagctgaccaaagacaagaacctgacggctgatccggctaaccaggcgttcagcatccagaccggcgagatccgctcccgcggccttgagctggaggcgaaggcggcggtgaacgctaatattaacgtcaccgcagcctacagctacaccgatgcggagtacactcacgatacggtgttcaacggcaaacgtccggcggaagtgccgcgtaacatggcctccctgtgggcggattataccttccacgaaaccgcgctgagcggtctgacgattggggccggggcgcgctatatcggttcaacggtcagctactacaaaaatgacaccagcaccggtaagaaaaatgatgcctttagtgtggccggttatgcgctgatggatgcgacggtgaaatacgatctggcgcgctttggcctgccgggatcgtcggtcggcgtcaacgtcaacaacctgttcgaccgcgaatatgtctccagttgctacagcgaatacgcctgctactggggcgccggacgtcaggtcgtcgccaccgccaccttccgttactaaccacctacgggcgcggttcgccgcgccctctatcaggttatcgctatgcaggaacagactccgcacgcagaaaccaccttcgcgctggatcgcgtcactttccgtgtgcctggccgcacattgctccatccgctctcgctcaccttcccgaccggaaaagtcacaggcctgatcggccataatggctccggcaaatcgacgttactgaaaatgcttggccgtcatcagccgccctccgcaggcgaagtgctgctggacgggcagccgctggagagctggggcagcaaagcctttgcccgcaaagtggcctatctgccgcagcagctgccgccggccgaaggtatgacggtgcgcgagctggtggcgatcggccgctatccatggcacggcgcgctgggtcgctttggcgcagcggaccgtgagaaagtagaagaggcgattgcgctggtggggctgaagccgctcgctcatcgtctggtggacagcctctccggcggtgaacgccagcgggcgtggatcgccatgctggtggcgcaggacagtcgctgcctgctgctcgatgaacccacctcggcgctggatattgctcatcaagtcgatgttctggcgctggtgcatcgtctcagccagcagcgcggcctgacggtgatcgccgtcctgcacgatattaatatggcggcccgctattgcgactatctggtggccctgcgcggcggagaaatgattgctcaggggacgccggcggaactgatgcgcagcgacactctggaacagatctatggcatcccgatggggatcctgccacacccggccggtgcggcgccggtaagctttgtctattgatgatgaacccaactctgataacccgacgccgcctgctgatcgcgatggcgctctcgccgctgctgtggcagatgcgcggcgcgcaggcggccgacgtcgacccgcagcgcgtggtcgccctggagtggctgcccgcggagctgctgctggcgctcggcgtgacgccctatggcgtggccgatattcccaactatcgcttgtgggtgaacgaacccgcgctgcccgactcggtgatcgatgttggtctgcgtaccgaacccaaccttgaactgctgacgcagatgaaaccgtcgtttatcgtctggtcggcgggctacggcccgtcgccggagaagctggcgcgtatcgcgcccggccgcggtttcaccttcagcgacggcaaacggccgctggcgatggcccagcgttcgctactggaaatggccgatctgctgggcaaaacgcagcaggcgaagcgccatctggcggagttcgacgcgctgatggagagcctgcgtccgcgttttgccgggcgcggcgatcgtccgctgctgatgatctctctgctcgatccccggcacgtgctggtgtttggcgaaaactgcctgttccaggaggtgcttgatcgctttggtattaaaaacgcctggcacggcgaagcggcattctggggaagcgttagcgttggcatcgacaggctggcggcatttaacgaagccgatgtcatctgtttcgaccatggcaatgagcgagatatggctcaactgctggcgacgccgctatggcaggcgatgcccttcgtgcgcgcgggccgcttccagcgcgttccggcggtttggttctacggcgcgacgctgtcagcgatgcattttgcccgcgtgctggctgatgcccaggggagtccggcatgaatacgcgtctctcgccgttagctattatcctgctggccgggctgctgggcgtcgccttcgcgctgagcatcgtcaacctcaatgtcgccttgccctatgcgcagtggcggcaggcgctgtggcagccggatgtcgatgatatcgcccaaatgctgtttcattacagtttgttaccgagactggctgttgcgctgctggtgggcgccgggctgggactggttggcgtcctgttccagcaggtgctgcgtaatccgctggcggaaccgaccactcttggcgtcgccaccggcgcgcagctggggataacggtcaccacgttatgggctattcccggcgtgctggcgtcgcaattcgccgcgctggccggggcctgtctggtgggcgcgctggtgtttggcgtctcgtggggcaagcgcctgtcgccggtaacgctgatcctggcggggctggtggtcagcctttactgtggcgcgcttaaccagctgatggtgattttccatcacgaccagctgcaaagcatgttcctgtggagcaccgggacgctgacgcagaccgactggagcgtggcgcagcgcctgtggccgcagctgcttggcggggcaatactcaccttgctgctgctgcggccgctgaccctgatggggctcgatgacggggtggcgcgtaacctcgggctggcgctgtccctggcgcgcctcggcgccctgacgctggcgatcgtcatcagcgcgctgctggtgaacgcggtagggattatcggctttatcggcctgttcgcgccgctgctggcgaaaatgcttggcgcccgtcggctgctggcgcggctgctgctggcggcgctgatcggcgcgctgctcctgtggctttccgatcaggtgatcctctggctgagccgggtatggcgggaagtctccaccggctcggtcaccgccctgattggcgcgccgctgctgctgtggctgctgccgcggttgcgcagcatcagcgccccggtgatgaacggcggcgataatgtgcagcctgagcgctatcatgtgcaatggtttgttctcgcaggcgtcgcgttgctgctgctggcggtgagcgtggcgctggcctttggtcgcgatgcccacggctggctgtgggcccacggcgatctgctggagcaactgctgccctggcgctggccgcgggtgctgtcggcgctgttcgccggggtcatgctggcggtcgccggctgtattatccagcgcctgaccggcaacccgatggccagcccggaagtgctgggcatcagctccggcgcggcttttggcgtggtgctgatgctgttcttcgtgcctggcgacgcctttggctggctgctgccggccggcagccttggcgcggcggccaccttgctgatcattatgcttgccgccgggcgcggcggcttctcgccgcatcggatgctgctggcggggatggcgctgagcaccgccttcactatgctgctgatgatgctgcaggccagcggcgatccgcgtatggcgcagatcctgacgtggatctcggggtcgacatatagcgcgacgccggagagggtggtgcgtagcggcgcggtaatgctggcgctgctggcgctggcgccgctctgtcgtcgctggttaaccatcctgccgctgggcggggaggcggcgcgagcggtgggcatggcgctgacgtcatcgcggattgttctgctgctgctggcggcctgcctgacggcggcggcgacgctgaccatcggcccgctgagctttgtcgggctgatggcgccgcatatcgcgcggatgatgggcttccggcgaaccctaccgcatatggtgatctccgggctgactggcgggctgctgctggtcttcgccgactggtgcggacggatgatgatgttcccgtatcagatcccggcggggctactgtcgacctttatcggcgcgccttactttatttatttgttgagaaagcagagtcgctaacggtcctggatggcttcaacatccccggtggcgctatcgcttaccggggctacagcgctgtgcgatttggtagcccggataaggcgcaatgcgcctcctccgggaaaatccctgcgccaccaggcattcaagcaccttacagcttggcaaatacccgacgcgcggcgtcgatggtgttgtcgatatcttcttcgctgtgggccacggacataaagccggcctcaaacgctgacggcgccaggtacacgccttcctccagcatcagatggaagaagcgcttgaatcgttcaacgtcgcacttcaccacgtcctgatagcaggtgacggtttcggcatcggtaaagaagatgccgaacatgccgccgacgttattgaccaccagcgggatcccggcgtcacgcgccgcatccagcaggccttgcgccagctggttagtcagttcagtcagggtttcatggacccccggctgcgccacttcgttcaggcaggcgaagccagccgccatggcgatcgggttgccggatagggtgcccgcctgatagaccggaccggtgggcgccagggcgtccatcacctcacggcggccgccgaaggcgcctaccggcatcccgccgccgatgattttccccagacaggtcagatccggctccacgccgtagtaagcctgagcgcctgccagcgccacgcggaagccggtcatcacttcgtcgataatcagcagggcgccaaattcgtcgcacagggcgcgcaggcccggcaggaattccggctgcggcggaatgcagttcatatttccggccaccggctcgacgatgatgcaggcgatctcctgcggatactgctcgaacgccgcgcgcaccgaggcgaggtcgttataagtgcaggtcagggtatgtttggcgaaatcggccgggacgcccggcgagttcggctggccgagggtcaacgcgccggaaccggctttcaccagcaggcagtcggcatggccgtggtagcagccttcgaacttaatgattttgtcgcgaccggtgaagccgcgcgccaggcgaatggcgctcatggtggcttcggtaccggagttcaccatccgcaccatatccatggtcggcaccagctcggtcaccagggccgccattttcacttccatttcggtcggcgcgccaaagctcaggccgcgggatgccgcctcgatcaccgcattgcggatagccgggtggttgtggcccagcaccatcggaccccaggaaccgacataatcgatataggctttcccatccacgtcatagaggtaagcgccatccgcgcgttcgataaacagcggtgtgccgccgacgccggtgaaagcgcgcaccggcgagttaacgccgccggggatcagttcgcgcgcagcgtgatacagattttcagatttgctcatggccagggtcctggttcgtgaaaaatgttttatcggctattctaagttattccaggatggttatgaaagttttgcccaattgaaacaatgtgccgcaagggcatttttttgacgacgcagcgcgccggggcggctaaaatgccgctctcttcatttgtattaccaataattgataacggcatgaaagcagaaactccctcttttgaagcacatcagtttgtgcgggtgcgtcgcggcgatgcggtgcgccgtctgattcaacgcgataaaacgccgctggcggtgctgtttatggcggcagtggtcggcacgctggcggggctagtgggcgtcgcctttgaaaagagcgtgaactgggtgcagaaccagcggatcggcgcgctggcgcaggtggcggaccactggtatctggtctggccgctggcgtttatcctgtcggcgctgctggcgatggtcggctattttctggtgcgtcgctttgcgccggaggccggcggctccgggattccggaaattgagggcgcgctggaggagctgcggccggtgcgctggtggcgcgtgctgccggtgaaattcgttggcggcatggggacccttggcgccgggatggtgctgggtcgtgaaggaccgatggtacagcttggcggcaacattgggcgcatggtgctggacgttttccgcatgcgcagtccggaagcgcggcatacgctgttggcgaccggtgcggcgtcggggctttcggcggcctttaatgcgccgctggccggtattctgtttatcatcgaagagatgcgcccgcagttccgctacaacctgatctccattaaagcagtgtttaccggcgtgatcatgtcgagcattgtgtttcgcattttcaacggcgaagcggcgatcattgaggtgggtaaactaagcaacgccccggtaaataccctatggctgtatctggtgctgggcatgctgtttggctgctttggcccgctgtttaattttctggtgctgcgcactcaggatctgttccagcgcatccacggcggcaacatcaaaaaatgggtgttgattggcggattaatcggcgggctctgcggtctgctggggctgatgcagccctccgcggtgggtggtggctttaacttgatccctatcgccgctgccggtaacttctccgtcggactgctgctgtttatctttatcgcccgcgtggtgaccacgctgatctgcttctcttccggcgcgccagggggcattttcgcgcctatgttggcgctcggcacgctgctgggcacggcgttcggcatggcggctattccgctgtttccggcctaccatctcgatgccggcaccttcgcgattgccggtatgggggcgctgctcgccgcctcggtgcgtgcgccgctgaccgggatcgtgctggtgcttgagatgaccgataactatcagctcattttgccaatgattattacctgccttggcgcaacactactggcgcaattcctcggcggtaagcctttgtattcgaccattctgcagcgtactctggcgaagcaggaagccgagcaggcggcaaaagcgcagcaggctccccgggagaatacttgaacgatttaccagggtattagataatggctcaaaaggtccggttattctttaaccggccggaagtatcaatgggagcagaaaatgagtgatgacgtagcgttgccgctggagtttaccgaagccgcagccaataaagtaaaacacctgattgcggatgaagataatccgaacctgaaactgcgcgtgtatatcaccggcggcggttgcagtggtttccagtatggcttcacctttgacgatcaggtgaacgaaggggatatgaccattgagaaacagggcgtcggcctggtggttgacccgatgagcctgcagtatctggtcggcggctcggtcgactataccgaagggctggaaggttcgcgctttatcgtgaccaatccgaacgcgaaaagcacctgcggctgcggctcctcgttcagcgtttaaagcgagttctcccccagcgggagggagcaaaccctaaaaacggtaaccttaaggttaccgttttgcttttattaccgaccgttatcgtccagggcaaacgtcggcagcttcagatgccagcgaatagccgccagacgaattaccagggtgaccaccatccccatcattgccgaattctccagcgggagatgaaaggtgtcgtgtgccgtggcgtggacaataccgccgacgatacaggcggtggcgtagatttcggtacgcagaatcataggaatttcccgcgccagcacgtcgcgaataatcccgccgccgacgccggtcaccacccccatgcacaccgcgaccagcgggccgctgccagcgagaaaagctttattgacgccaatgccgacaaacaccgccagaccgacggcatcaagaacgggcaggatccatttcggcagccggcgaggctggcggaccagcaggatggtcagcatgctggtgaccatcgccaccaccagatcggtgggatctttgacccagaataccgggccattcgccagcgccatgtcgcggatggtcccgccgcctaccgccgtcactacccctaacaccagcacgccgaatgggtccatacgcagttttccggccagcagtacgccggagatcgcgaagacagctgtgccaataatatccagccaatagacaagcatcgttgattcccactgaacatccggtgtgccggatgattattttacctggtcaagcgccgcacaaagttgtttggcggcgaggataatacgtgggccggcgcgttcaaaccagtcgctgtgtaacgcaatcaacgaaatggtgagctgatgttgccaaaagcgctgcgcttcggcaatgcggctggcatccccggtcaccacgatcgcctgcggctggcgggccagcacctgttcgcggctcacctgcggccagggaacgcggctggtggcgaagatattctcgccgccgcaaagccttagcacctgatcctgaatcgaaccggggccgctggtgaacagcggtgcggagccgaactgcaggaagacgcgtttcttcggcgcgttggcatagcgcgctttcaacgcatcgtattcctgctgcatcgcctgcgccgcctgctgcgctttttccggctgcgggctccactgcgccagctcacgcagggtagcgatgatctcttctatggtcgaggtctgtacccacaggacatgaatacccagagactgcagctggttaacctggcgttcggcattgcccccgcgccaggccagcaccacgtctggcttgagcgccacgatgcgttccaggttcattccctgccagctggcaacctgttcgatcgttttggcctgcgaaggataatcggaatagctgctgacgccgaccggcgtgatcccggcggcaaaggccagttcggtattggcgggggagagggtgatcacccgcggcgcggccagcagccacgccggggcgagtaacagcagcgcggcaagcgcgaaggatagcgacttagccacgtgccaggttctgtaccagattctccaccatcagggtggactgtctggcggcgaccgcaaggaactcctcaaagctgaggtgggactgctggtcggccacgtcggaaatagcgcgaactaccacgaagggaaccttaaagttatggcagacgtgggcgatggcggtcgcttccatttccacggcgatcgcctgcgggaaattatggcggatcttcgccagaccgacagagccgttaatgaaggcatccccgctaacgatgaggccgcgaacggcgttgagatctaacgctttaatgcagctctctgcggcggccaccagtttttcatccgccttaaaacccgccgggcagccagggagctggccgtattcatagccgaaggcggtgacgtcggcgtcgtggtagcgcgcttcatcggagacgacgatatcgccgaccttcagcgtcgacgccaggccgccggcagaaccggtattaatgatcacgtcaggctggcagcgctccagcagcagggtcgcgcccatcgccgccgctacttttccgataccagacttcagcagagcgacgtcaacgccgtgaagttggccggtatagatttcgcttccgccaatggtgatggtctggcggttttcgattttgtcgcgcagaagggtaacttcctcttccatagcgccaataatgccaattttcatagatttactcgcgatgtgtcaggtttagttgcatagtctatcatgcgcttaaggggaagcgtattgctcgcgcgggagaggctatggcaaagattgattttcgcaacaagataaactggcgtcgacgcttccgttcgccgccgcgggtggagacggagcgcgacatcctgcggatctttgaaagcgatcggggacggatcgtcaactcgccggcaatccgccgcctgcagcaaaaaactcaggtcttcccgctcgagcgcaacgcggcggtgcgcactcgcctgacccactcgctggaggtgcagcaggtggggcgctatatcgccaaagaggtgctgagccggctgaaagagcagaggctgctggaagagtatggcctggaagagctgaccgggccattcgagagcgtggtggagatggcctgcctgatgcacgatatcggcaatcccccgtttggccattttggcgaagcggcgattaacgactggttccgtcagcgcctggcgcccggcgatgcgctcgggcagccgctgatcgacgatcgctgcgaagtgcaggccttacgcctgcatgacggagagacatcgcttaatgcgctgcgccgtaaagtgcgccaggatctctgcagctttgagggcaacgcgcagggcattcgtctggtccatacgctaatgcgtatgaacctgacctgggcgcaggtgggatgtatcctgaaatatactcgtccggcgtggtggtctgaggagacgccggccagccacagttatttaatgaagaaacctggctattatttagccgaagaagagtatgtcgcgcgtttgcgtaaagaactggatctcgcgccttacaatcggtttccattaacctggattatggaggctgcggatgacatctcatattgcgtcgcggatctcgaggacgcggtggaaaaacgtatttttagcgcagaccagctctatcagcatctttacgacgcctggggcagtcatgaaaaaggctcgttattttcgcaggtagtagaaaatgcctgggagaaatcgcgagccaattatctgaagcagagcgcggaagatcagttttttatgtatttgcgggtgaatacgctgaataagctggtgccctacgcggcgcgccgatttattgacaacctgccggcaatcttcacgggggactttaatcatgcgttgctggaggacgacagcgattgcagtcagctactggagctctataaaaatgtggcgatgaaacaggtctttagccatccggatgttgagcagctggaattgcagggctaccgggtgatcagcggcctgttggatatctatcagccgctgctgaaattatcgctggaggatttcagcgaattagtagcgcaggagcgggtacgacgtttacccattgcctcccggctgtatcagaaactttcgacccgtcaccggctggcctatgttgaagcggtaaataaactggcgcgtacggcgcccgaatttgcgctgatggaatactattatcgctgccgtctgattcaggactatatcagcgggatgacggatttgtatgcgtgggatgaatatcggcgactcatggcggtggaataggctggagttttgtaaagatggacaataaatttttactttttccagaaacttaattccggaacttagcgttataaaatgactctgatagtcacgtacacagcaactttcgttacctgatattgagattgaaactgatgaaaaaaaccacgttagcaatgagtgcactggctctgagtttaggtctggcgttgtccccgctctctgcgagcgcggcagaaacggcatcttcggccactaatgcacagcagatgccaagcctggccccgatgctggagaaggtgatgccgtcggtggtgagcattaacgttgaaggtagcaccaccgttaataccccacggatgccacgtaacttccagcagttctttggcgataattcgccgttctgccaggatggttctcctttccagagttcgccgttttgccagggcggcggacagggcggtcagcctgacggcggccagcagcagaaatttatggcgctgggctccggcgtcatcattgatgccgccaaagggtatgtggtgaccaacaaccacgtcgtggacaacgccaccacgattaaggttcagctgagcgatggccgtaggtttgatgctaaagtcgtcggcaaagatccgcgctctgatatcgcgctgattcagattcaggatccaaaaaacctgacggcgattaagcttgccgactccgatgcgctgcgcgtcggtgattacaccgtggctatcggcaacccgttcggtctgggcgaaaccgtgacctccgggattgtctccgcgctgggccgtagcggcctcaacgtggaaaactacgaaaactttatccagaccgatgcggcgattaaccgcgggaactccggcggtgcgctggtgaacctcaacggcgagctgatcggtatcaacaccgccattctggcgccggacggcggcaacatcggtatcggttttgctatcccgagcaacatggtgaaaaacctgaccgagcagatggtgaaatatggccaggtgaaacgcggtgagctcggcattatgggcaccgaactgaactctgagctggcgaaagcgatgaaagtcgatgcccagcgcggggccttcgtcagccaggtaatgccaggttcggcggccgcgaaagcgggcattaaagccggcgatgtcatcacctccctcaacgggaaagcgatcagcagcttcgccgcgctgcgtgcccaggtcggcaccatgcctatcggcagcaaagttgagcttggtctgctgcgcgacggcaaaccggtgaccgtgaccgtcgaactgcagcagagcaaccagacccaggttgactccagcaccatcttcaacgggattgaaggggcggaaatgagcaataagggtcaggataagggcgtggtggtcaataatgtgaaagccggtaccccggcggcacagattggcctcaagaaaggcgacgtcatcgtcggggcgaatcagcagccggtgaaaaacatcgccgatctgcggaaaatcttcgacgccaaaccgtccgtactggcgctgaacattcagcgcggcgacgcctctatctatctgctgttgcagtaaccgccagcgctcgcttcccagccccttccctcgccgagggcaggggcttttttcgttctgtgaccgcccccacaactccacatatctcaccccggcttagtgcaaatgcacaatgcagcgcgacgatgactcttttatgctggtgcccagcaaaggggaggactacatggctggctggcatcttgataccaaaatggcgcaggatattgtggcgcggaccatgcgcatcatcgataccaatatcaacgtgatggatgcccgcgggcggatcatcggcagcggcgatcgggaaaggattggtgaattgcacgaaggcgcgctgctggtcctctcccaggggcgggtggtggatatcgacgacgcggtcgctcgccatctgcacggggttcgccaggggattaacctgccgctgcgcctggagggggagatcgtcggggtgatcggcctgaccggcgagccggagtcgctgcgaaaatatggcgagctggtgtgcatgacagcagagatgatgctggagcagtcgcggctgatgcatctcctggcccaggacagccgtctgcgcgaagagctggtgatgaacctgattcaggcggaagagcataccccggcgctgaacgaatgggctcagcgtttaggcatcgatctcaatcagccgcgcgtggtggcgatgattgaggtagacagcggtcagctcggcgtggacagcgcgatggcggaactgcaacagttacagaacgcgctgaccacccccgatcgcaataatctggtggccattgtctcgctcacggaaatggtggtgctgaaaccggcgctgaacagctttggccgctgggacgctgacgatcacgtccggcgcgtcgagcagcttatcgccaggatgaaagagaatggccagctgcgctttcgcgtggcgctgggcaatttcttcaccggcccaggaagtatcgcccgctcttaccgtaccgcacggacgacgatgatggttggcaagcagcggatgccggagagccgcagttatttctatcaggatctaatgctgccggtgctgcttgacagcctgcgcggcggctggcaggccaatgagctggcccgtccgctggcgcgtttgaaggccatggacaacaacgggctgctgcggcggacgctgcaggcgtggtttcgccataacgtgcagccgctggcgacgtcaaaggcgctgtttattcatcgcaatacgctggagtaccggttgaaccgtatctcggagctgaccggcctggatctcggtagctttgacgacaggctgctgctgtatatcgcgctgcagctggacgaacaacgctaagacgtggaggcaaaaaaatgccgggcagcgacgcgccatacccggcctggacgatgcatgctgtctggagtggatagagaccaccagcccggccaggcaacgcgccgccgggatgctcttacttacgggtgagcttttccagatcggcttcgatttcgctgatcttattggtgaccacgctttccagatggcgtaaatcgtcgaggattttacgcttgagatcgatttcagtgcgatcgcgctggcagatctgatccagctcgtcgataacgtagcgcagattggggctgatctcctggacctctttgtagccctggccgacgccgtcggcgacgacggttttgcgctgacgcggatatttgaacttcacgctcttggcgaagaattcgcctttgtctttctgaaaatagattttcagaatgtcgttgttagcttcctgccgcaggctatagcgatcgatctcatcagggttggtaatgccaagacttttcagattatcgtacataacggtacctttgatagcatcataaccattgaataattaacgaaaaaatccattttcgccagcatcaaatataaaaaaagcgggatatctcccgctttttatttgctttagtcgatggtgcgcagcagttcgttaatgccgaccttgccgcgggttttggcatcgactttcttcactatcaccgcgcagtacaggctgtatttaccatctttcgacggcaggttgcctgagaccaccaccgagccagccggtacgcggccgtagaagacttcgccggtttcgcgatcgtagattttggtgctctgaccgaggtaaacgcccatggagatgacggagccttcttcgacaatcaccccttcaaccacttcagagcgcgcgccgatgaagcagttatcttcgatgatggtcgggttcgcctgcagcggctccagtacgccaccgataccgacaccgccggacagatgcacgtttttaccgatctgcgcgcaggagccgacggtggcccaggtatcaaccatggtgccttcgtcaacgtaggcgccgatgttaacgtaggacggcatcagcacagtgttgcgggcgatgaacgcgccctggcgcacggcggccggcggcaccacgcggaaaccttctttctggaaacgcgcttcgtcgtagtcagcgaatttcatcggcactttatcgaagtagcggctttccgcaccatcgataacctggttatcgttaatacggaaagagagcagtaccgccttcttcagccactgatgcgtcacccactgaccgtcgatcttctcagcgacgcgcagcgcgccggaatcaagaagggcgataacctggttaaccgcttcgcgggtcacggtatccacattagccggcgtaatgtcggcgcgacgctcgaaagcggactcaataacgttctgtaactgctgcattgtttctttccattcactaaaaaaaatacgtcaccctttatcgtttggattgagggccgctgtcaaccgttgttgcacttcttgttgcagctcattattaagggcacgccggtcggcggtggcgattataaataaatcttctactcgctcaccaattgtcgtaattcgcgccccgtgaagcgatatcccgaggtcggcgaacacctgcccaacgcgggcgagcagcccgggctggtcgagcgctatcagctccagaaacgattttcggtcggtatgggtcggcaggaaattcacctcggtgtccacggaaaaatggcgtagctttgccgcctgacgacgcggggccggaggctgccagctgcgctgagtgatggtctgctccagcccctggcggatcgcctcgtggcggtcggcggaaagggggctgccgtcgggctcaaggacgataaaggtatccatcgccataccgtcgcgggtggtgaagatctgcgcgtcgtggacgctgaggttgcgacggtcaagttcgccacacaccgcggcgaacaggtaagggcgatccgggctccagataaaaatctccgtaccgccgcgggtggcctgcgagctcagcaggatcatcggtttattcagatcgtggcgcagcaggttgcgggcgtgccaggcgagctgcgtcggcgtatgtcgcacgaaatagttggcgcggcagcggttccagatctgatgcagcgcctcttcattaatattgtccatccgcagcagggccagcgcctgcagctgatggtgacgcactcgttcgcgcatgtccggggtgctttgcatgccgcgacgcagctgcttctcggtggcgaaatagagttcacgcagcaggctctgcttccagctgttccacaaggtttcgttggtggcgcagatatcggcgacggtcagacacaccagatagcgcagacgattttccgtttgcacctcctcggcgaactgcttaatcacctccggatcctgaatatcgcgccgctgggcggtgaccgacatcagcaggtggtgacgcaccagccaggcgaccagctgcgtttcgcgcgagttcagcccgtgcagctcggcaaacttcagcacatcctgcgcgccgaggatcgagtggtcgccgccgcgccctttggcgatgtcgtggaacagggcggcaattaagatcagctccgggtgcgttaagcgcggccacagctccacgcacagcgggtggcggctgcgggtttcttctttggcaaagctttccagcttgagcatcacccggacggtgtgttcatcgacggtgtaggcgtgaaacaggtcgaactgcatctggccgacgatatgcgaccactgcggcatataggcccacagtacgctgtggcgatgcatcggcagcagcccgcgacttaccgctccctgatggcgcagcatactaagaaagagcgtgcgcgcctccgggatatagcacagcggctgggtgagatgacggcgggcgtggcgcagatggcgcaacgtcgttgagtagatgccggtgatggtgctgttgcgcaccatgatataaaacatgcgcagaatggcctgcggttcgcgaataaacagcgtgtcgtcacgcagatcgataagggtgccgcgcagctggaaatcatcatcgatcgggcgtggtttttcatcctcggtcagggcgaggatagcctcctcaaacagctgaagcagcatctgattcagctcgctcacccggcgggtaacgcggaagaagtccttcatcatatgctcaatcggctggttgccgtcgccttcatagcctagccggcgggccacgctgagctggcggtcgaaaagcagacggttgtcatagcgcgtgagttcgagatgcagcgcgaaacggatgcgccacagctgatgcagacactcattgagttcattgcgctcggcttcggtcagaaagccgaagccgaccatctcatccattgaggtggcgccgaaatggcggcgagccacccactgtagcgtatggatatcgcgcaagccgccggggctgcttttcacgtccggctcgaggttatagctggtgccatgatagcgctgatgacggacgttctgctcttcgaccttggcggcgaagaacttttccgatggccagaagccgtcgctaaaaatatgtttttgcagttcaaggaacagcgcgacgtcgccgatcagcaggcgcgattcgattaagttggtggcaacggtcagatccgagagaccttccagcaggcactcttcgagggtgcgtacgctgtggcccacctccagcttgacgtcccacagcagggtgagcagttcgccgactttttgcgcctggtcgtccggcagttttttacgactgaggatcagcagatcgacgtctgagagcgggtgcagttcgccacggccatagccgccgacggcgaccagcgccaggtcgctgacggattcaaaaccgcaggcgatccataatcgctgcagcaactggtcgataaattcggtgcgcgccgcgatgagctgctccgcgacgatgccggagtcaaacgcctcgcccagccagtgctggaaggtatcgatgtgcgccttgattgcggcacagttcagatcgccctggggccaactcaccgggtgttccggcgggacgggcaggagaggggaggctgtgtcaggtaatgagttgctcatcgcgtcaccataagaaaaaactatctaataaaaaagccggcgggcgccggcttttcatcattcatcgtgcgagattatcgccgggatggtgtcatccttgcgtagcgtcagaatttcgcagccgttgtctgtcaccacaatagtatgctcgtactgcgcagacaagctccggtctttggttttcaccgtccagccgtctttcatgctgcggatctcttttttaccggcgttgaccatcggctcgatggtgaaggtcatgcctggtttgagtacgacgttggtctccggcgaatcgtagtgcagtacctgaggctcttcatggaagccgcggccgatgccgtggccacagtactcgcgaaccactgagaaaccttcggcttccacaaatttctggatcgccgcgccgatggtgcgcaggttgatgcctggcttcaccattctcagcgccaggtacaggctttcctgagtgatgcggcacaggcgctcgccgagaatcgtcggtttgccgacgataaacattttggaggtatcgccatggaaatcatctttaatgacggtcacgtcgatattcacgatatcgccatctttcagcagcttgccgtcatcagggataccgtgacagaccacttcattgaccgaaatgcagacggatttcggatagccgtgatagccgaggcaggcggaaatggccttctgctcgttaacgatatagtcgttacagatgcggtccagttcgccggtgctgacgcccggtttgacgtagggttcgatcatttccagcacttcggcggccagacggccggcaacgcgcattttttcgatgtcttcagatgtcttaatagagatagccatggagtatgtccagcagtgtcgatattttcgacaataatagagtaagtcctgtcaatggtaacagtccgggcaggctggtgccaaactgagaatcattaacagcacgcgacgtcaacaagagttggtgtctggatggattttgtggtataaagcgcgccggacttccgttccatctcagatacacaaggatggacgtaagcgacatagctcactttgtgtaataacacacacgtatcggcacatattccggggtgcccttcggggtcggtaatatgggatacgtggaggcataaccccaatttaatctatagaggttttaaacatggcaactgtttccatgcgcgacatgctcaaggctggtgttcacttcggtcaccagacccgttactggaacccgaaaatgaagcctttcatcttcggcgcgcgtaacaaagttcacatcatcaaccttgagaaaaccgtaccgatgttcaacgaagctctggctgaactgaataagatcgctgctcgtaaaggtaaaatccttttcgttggtactaagcgcgctgcaagcgaagcggtaaaagacgctgctctgagctgcgatcagttcttcgtgaaccatcgctggctgggcggtatgctgactaactggaaaaccgttcgtcagtccatcaaacgtctgaaagacctggaaactcagtcccaggacggtactttcgacaagctgaccaagaaagaagcgctgatgcgcactcgtgagctggacaagctggaaaacagcctgggcggtatcaaagatatgggcggcctgccggacgcactgttcgttatcgacgctgaccacgagcacatcgctatcaaagaagcaaacaacctgggcatcccggtatttgctatcgttgataccaactctgatccggacggcgtagacttcgttatcccgggtaacgacgatgcaatccgcgcagtaagcctgtacctgggcgctgttgctgctaccgttcgtgaaggtcgctctcaggacctggcttctcaggcggaagaaagcttcgtagaagctgaataataaggtttaagcccttattagtaccgtgtatgaataggggcccattatcggccccttttttcaatttacgctgtttggccgttggccgggcagtatccacatctcccgaggattttagaatggctgaaattaccgcttccctggtaaaagagctgcgcgaacgtactggcgcaggcatgatggattgcaaaaaagcgctgactgaagcgaatggcgacatcgagctggcaatcgaaaacatgcgtaaatccggcgcgatcaaagcggcgaagaaagcaggcaacgtggctgctgacggcgtgatcaaaaccaaaatcgaaggcaactacggttacattctggaagttaactgccagactgacttcgttgctaaagatggtggtttccaggcatttgccgacaaagtactggacgccgctgttgcaggtaaaatctccgacgttgaagttctgaaagcgcagttcgaagaagaacgtgttgcgctggttgctaaaatcggcgagaacatcaacatccgtcgtatcgctgttctggaaggcgacgttctgggcagctaccagcacggtgcgcgtatcggcgttctggttgccgctaaaggcgctgacgaagagctggttaagcagctggcaatgcacgttgctgcaagcaagccggaattcgttaagccggaagacgtgtctgctgaagtggtagagaaagagtaccaggttcagctggacatcgcgatgcagtccggtaagccgaaagaaatcgcagagaaaatggttgaaggccgcatgaagaaattcaccggcgaagtttctctgactggtcagcctttcgttatggagccgagcaaatctgttggccagctgctgaaagagcacaacgctgacgtgactggcttcatccgctttgaagtgggcgaaggcattgagaaagttgagactgactttgcagcagaagttgctgcgatgtccaagcagtcttaatttttaaaaaaaggagccgcctgagggcggcttctttttgcgcccattttgtaaattcagccaactgcttatagtggccgcgctgaaatgcgacatacaatgtcgccggaattatcacatctcattcgttgacagtctcaggaaagaaacatggctaccaatgcaaaacccgtctacaaacgtattctgctgaaattaagtggcgaagcgctgcagggctcagaaggcttcggtattgatgcaagcatacttgaccgcatggctcaggagatcaaagagctggttgagctgggtattcaggttggcgtagtaattggtggcggtaacctgttccgtggtgctggtctggcgaaagcgggtatgaaccgcgttgtgggcgaccacatgggcatgctggcaacggtcatgaacggcctcgcaatgcgtgatgcgctccaccgcgcctatgtgaacgctcgtctgatgtccgccattccgctgaacggcgtatgcgacaactacagctgggcagaggcgatcagcctgctgcgcaacaaccgcgtagtgatcctctccgctggtaccggcaacccgttctttaccaccgattccgcagcctgcctgcgcggtatcgaaattgaagccgatgtggtgctgaaagccaccaaggttgacggcgtattcaccgctgacccggcaaaagatccttctgccaccatgtacgatcagctgacctacagcgaagttctggaaaaagagctgaaagtcatggatctggcggccttcaccctggcgcgtgaccataaattaccgattcgcgtctttaacatgaacaaacctggcgccctgcgtcgcgtggtgatgggcgaaaaagaaggcacattgatcacggaataattcccgtcagcgccaaatccgggtaatattccgctttactttcgcggggatattgcccggtgattttcattaaatctgactatacttagctcattttccgacgggtgccccgtctggtctgactgagacaagctttcaaggattcgtaacgtgattagcgatatcagaaaagatgctgaaatccgcatggaaaaatgcgtcgaagcattcaaaaaccaaatcagcaaaattcgcacgggtcgtgcttctccgagcctgctggacgggattgttgttgaatactacggtactccgaccccgctgcgccagctggccagcgtcaccgtcgaagactcccgtaccctgaaaatcaacgtctttgaccgttctatgtccgcggccgttgaaaaagcgatcatggcgtcagacctcggtctgaacccaagctctgccggcagcgatattcgtgttccgctgccgccgctgaccgaagagcgtcgtaaagatctgaccaagatcgtgcgtggtgaagccgagcaggcgcgcgttgccgtgcgtaacgttcgccgtgacgccaacgataaagtcaaagcgctgctgaaagaaaaagagatcagcgaagatgacgatcgccgttctcaggacgacgtgcagaaaatgactgacgccgccatcaaaaaagttgacgcggcgctggcagacaaagaagcggaactgatgcagttctaatgctctgcccttactcgggccagacaggctctggcctgagtaaaatctgaaacgccgtacagaagactgtacgctcaattctcgggattgcgttgcaaccgctggccttgtagcctttagcgcttagttgaaggcctaatgccgccgtctcatccccgatagttgctgcgtaggggcttgctggcggcgttttgctttttattctgtttccactcttctggacgtctcatgaagcaattaaccgttctcggttcgaccggctccattggctgtagcacgctggacgtggtgcgccataaccctggtcgcttttccgtcgccgcgctggtcgcggggaaaaacgttgaccgtatggttgaacaatgcctggaatttaccccccgttacgcggtgatggacgatgcgcaaagcgctgagcggttgcgcacccgtctgcatgagcatggcagtcgcaccgaggtgctgagcggccagcaggcggcggcagaggtcgcggcgctggatgaggtcgatcaggtcatggcggcaatcgtcggcgcggcgggactggtgccgacgctggcggcgatccgcgccgggaaaacggtattgttagcgaataaagaatcgctggtgacctgcggtcgcttattcatggaggcggtgcaacagtcgggggcgcgattgctaccggtcgatagcgagcataacgctatttttcagagtatgccggagacaattcagcagcatctgggatacgctgatcttgcccggaatggcgtctcgtcaatcctgctgaccggctccggtgggcctttccgcgagacggccgtggctgaactggcggcgatgaccccggatcaggcctgccgtcatcccaactggtcgatggggcgcaagatctccgtcgattcggccacgatgatgaacaaaggcctggaatatattgaagcgcgctggctgtttaacgcctcggcccagcagatggaagtgctgatccatccgcagtcggtgatccactcgatggttcgctatcaggatggcagcgtgctggcccagcttggggagccggatatgcgcacgccgatcgcccataccatgggctggccgcagcgactgaattccggcgttaaaccgctggacttctgtcagttgagcaatctgagcttctccgcgccggactatacgcgatatccgtgcctgaagctggcgatggacgcgtttgacgtcggccaggccgcgaccacgacgctgaatgcggctaatgaagagtcggttgccgcgtttctgcatggcgatatccgctttaccgatattgcggcggttaacctggcggtgctggataagatggacctgcaggagccgcaaagcattgatgatgttctggttatcgacgccgaggcgcgcgcaatcgctcaccagcagctgcagcggttggttgcgcaggcgtaacgcggtgatatttgtgggcgcaaggcttcggtgatatagtctgcgccacccgatcgttgcattttgttgttaaagattacggtggccgtgacaaaacacggcttttttgcgtaaagcttttggttgttctctgcgattggctgcagccccggcaccggataaaaatgcgtatccagcgcggcccggtggcctctgtttggtggctagttaatccttattatggacttaaaacgcgtgatgttgtctgctaatcaaactgtcagcgaaatatcgcccacccatggctgccgtcatgtcgccattattatggatggcaacggccgttgggcgaaacggcaaggtaaaattcgcgctttcgggcataaggccggtgcgaaatccgtgcgtcgcgcggtctccttcgcggcgaataatgggattgaggcgttaacgttatacgcgttcagcagcgaaaactggaaccgtccggctcaggaagtcagtgcgctgatggaactgttcgtctgggcgctggatagcgaagtcaaaagcctgcaccgacacaatgtgcgtctgcggattattggcgacaccacgcgcttcaatgcgcgcctgcaggagcggatccgcaaagcggaagcgctaaccgcaaacaataccggcttaacgctgaatattgcagccaattacggcggtcgctgggatattacccagggcgttcgtttgctggcgaaacaggtacaggacgggacgctgctgcctgagcagatcacggaagacatgctgagtcagcaggtctgcatgcatgaactggctcccgttgatttagttattaggaccgggggagagcaccgaataagtaactttctgatttggcaaattgcctatgccgaactttactttacggatgttctttggcccgattttgctgaacaggactttgaaggtgcactccatgcctttgttaatcgagagcgtcgtttcggcggcactgagccgggtggcagtcatgcctgatgggggtcacttttgctgaagtatcgcctgatatctgctttcgtcttaatccccatcgtcattgcggcattgtttttattgccgccgatgggctttgctatcgtcaccctggtggtctgtatgctcgccgcctgggagtggggacaactgagcggttttacctcgacgtcgcagcgggtttggctggcggtgctgtgcggccttctgctggcggcgatgctttttctgctgcctgaataccactatgacgttcatcaaccgatggttgaagggtcgctatgggcctcttttgcctggtggatcgtcgcgttactgctggtgctctcatacccggcgtcggcggcattctggcgccactctaaggtgctgcgcctcatcttcggcattctgaccatcgtcccgtttttctggggcatgctggcgctgcgcgcctggcactatgccgataaccactatagcggcgcgctgtggctgctgtacgtcatgatcctggtgtggggcgcggactctggcgcctatatgtttggtaaaatgtttggcaagcacaagctggcgccgaaggtctcaccgggtaaaacctggcagggcttttttggcggtttgctgaccgcggcagtgatttcctgggcctacggcgtgtgggcccatcttgacgtcacgccgacggtgctgctggtctgttcggtggtggcggccctggcttcggtgctgggcgacctgacggaaagtatgtttaagcgcgaggccggcattaaggatagcgggcacttgattcccggacatggtggtattctcgatcgtatcgacagcctgacggcggcggtaccggtcttcgcctgtctgctactgttggtcttcaggacgatttgacggaaggttatatgctgagcgtgctctggaatctggcggcttttatcattgcgcttggcgtactgattacggtgcatgagtttggccatttttgggtggcgcgccgctgcggtatccgggttgagcgtttttctatcggcttcggcaaagcgctgtggcggcggatggataagcagggcacagagttcgtcatcgccctgatcccactgggcggctacgtcaagatgctggatgagcgtgttgaagcggtggcgccggagatgcgtcactatgccttcaacaacaaaaccgtcggtcagcgtgcggcggtgattgccgccggccccatcgctaacttcattttcgctatctttgcttactggctggtctttatcatcggcgttcccggcgtgcggccggtggtgggtgaaataacgcccaattcggttgccgcgcaagcacaaattgcaaaaggaacggaacttaaagcgatagatggtatcgaaacgcctgattgggatgcggtgcgtctgcagctggtggccaaaatcggcaacccgcaaacaatagttaccgtcgcccctttcgggaccaatcagcgccaggataaaatcgtcgatctgcggcactggtcgtttgagccagacaagcaagatcccgtgacctcgctggggatccagccgcgcagcgcgcagattgatacggtgctggctgaggttcaggcgggatcggcagcccagaaagcgggtttgcaagcgggcgaccggatcgttaaagtcgatggtcaaccgttaacgcagtggatgacgtttgttaatctggtgcgcgataatccgggcaaagcgctggcgctggagattgaacggcaggggagtgtgctgccgttaaccctgacgccggatgcgaaaacggtgaaaggtaaggcggaagggttcgcaggggtggtgccaaaggtcatcccgctgcctgaagaatacaagacagtacgtcagtacggaccgtttgccgccatcgctgaagccacggataaaacctggcagctgatgtcgctgacggtcaggatgctgggtaaattgataaccggtgatgtcaaactgaacaacctcagtgggccgatctctatcgctcagggggctggaatgtcagcggagtttgggttgatttattatctgatgttcctggcgctgattagcgtgaacctcggaatcatcaacctgttccctctacccgtactggatgggggacatctgctgtttttagcgattgaaaagctgaagggcgggccggtatccgagcgagttcaagactttagttatcgcattggctcaatactgctggtgctgttaatggggcttgcacttttcaatgatttctctcggttataagagagtttgttaggaagaacgcataataacgatggcgatgaaaaagttgctcatagcgtcgctgctgtttagcagcgcgactgtatacggtgctgaagggttcgtggtgaaggacattcatttcgaaggcttgcagcgtgtcgctgttggtgcggccctcctcagtatgccagtgcgtcctggcgatacggtgaccgacgatgatatcagtaacactattcgcgcgctgtttgccactggcaacttcgaggacgtccgcgtcctgcgcgatggtgataccctgctggtgcaggtgaaagagcgtccgacgatcgccagcatcaccttctccggcaacaagtcggtgaaagatgacatgctgaagcagaaccttgaggcctcaggcgttcgggtgggcgagtcgcttgaccgcacgaccatcgcggatatcgagaagggtcttgaagacttctactacagcgtcggtaaatacagcgccagcgtcaaagcagtcgttacgccgctgccgcgtaaccgtgtcgatttgaagctggtcttccaggaaggcgtctccgcaaaaattcaacagatcaacatcgtcggcaaccatgcgttttcgaccgatgagctgatctcccacttccagctgcgcgatgaggtgccgtggtggaacgtggtcggcgaccgtaaataccagaagcagaagctagcgggcgaccttgaaaccctgcgcagctactacctggatcgcggctatgcccgtttcaacatcgattctacccaggtcagcctgacgccggataagaaagggatctacatcaccgtcaacatcaccgaaggcgatcagtacaagttttccggagtgcaggtgacgggcaacctcgctggccattccgcggaaatcgaagcgctgactaaagttgagccaggcgaactgtacaacggcgcgaaagtgaccaggatggaaaacgacatcaagaaactgttgggtcgttatggttacgcctatccgcgcgtgcagtcgcagccggagatcaacgacagcgataaaaccgttaagctgcacgttaacgtcgacgcaggcaaccgttattacgtgcgtaaaattcgcttcgaaggcaacgacacctctaaagatgccgtactgcgccgcgaaatgcgccagatggaaggcgcatggctgggcagcgacctcgtcgatcagggtaaagaccgtctcaatcgtttaggtttctttgaaacggtggatactgatacccagcgcgtgccgggcaacccggaccaggtcgacgttgtctacaaggtgaaagagcgtaacaccggtagcttcaacttcggtatcggctacggcaccgagagcggcgtcagcttccaggcgggcgttcagcaggataactggttaggtactggctatgctgtcgggatcaacggtaccaaaaacgactaccagacctataccgagctgtcggtgaccaacccgtacttcaccgtagacggtgtaagcctcggcggtcgtgtcttctataatgactttgatgcaaacgatgcggatctgtctgactataccaacaaaagctatggtacagacattacgctgggcttcccggtcaatgaatacaacacgctgcgcgccggcgtcggttatgtgcataactccctgtccaatatgcagccgcaggtggcaatgtggcgttaccttaactcgatgggccagtatccggacaacaccaacgaccggaactcgttcagtgcgaatgacttcaccttcaactacggttggacctataacaagcttgaccgcggcttcttcccaacggaaggttcgcgcgtcaacctgaacggtaaggtgaccattccgggctcagacaacgagtactacaaagcgacgctggataccgcgacctacgtgccgatcgacaacgatcatcagtgggtagtactgggtcgtacgcgctttggttatggcgatggtatcggcggcaaagagatgccgttctatgagaacttctatgccggtggttccagcaccgtgcgtggcttccagtcgaacaccattggtccgaaggcggtgtacttcccgtcgagcagccgtcatgatggcgatagcggttataccaatgactgtaagagcaccgaatccgcaccgtgtaaatccgatgatgcggttggcggtaacgcgatggcggtggccagccttgagctgattaccccgacgccgtttattagtgacaaatatgcgaactcggtccggacttccgtcttctgggatatgggtaccgtatgggatactcactgggattcgagcgcgtacgctggttatccggattacagcgatccgagcaacatccgtatgtctgcgggtattgccgtgcagtggatgtcgccgttggggccgttggtcttctcctacgcccaaccgttcaaaaagtacgatggagacaaagccgaacagttccagtttaacattggtaaaacctggtaattgttggcggcaacggaatgcaagtgcagtatagcgctgaccgtaggcgataacgcgtttatcgcctcgccacgcaaataacggtacccctgggtactcatgggatggtaaggagtttattgtgaaaaagtggttattagctgcaggtctgggtttggcaatggtaacttccgctcaggcggcagataaaattgccctggtgaacatgaacagcctgttccaacaggttgcccagaaaactggcgtttccaacacgctggaaaacgagttcaaaggccgcgctagcgaactgcagcgtatggaaggcgacctgcagtccaaaatgcagcgtctgcagtccatgaagccgggcgccgatcgtaccaaactggaaaaagacgtgatggcacagcgccagaccttctcccagaaagcgcaggcgtttgaacaggatcgcgcacgtcgttccaacgaagagcgtggcaaactggttacccgtatccagactgccgtacagagcgtagcgaaagatcagagcatcgatctggtggttgacgcgaatgccgttgcatataacagcagcgatgtaaaagacatcaccgctgatgtgctgaaacaggttaaataagtaatgccttcaattcgactggctgatctcgcgcagcagttggatgcagaattacacggtgatggcgatatcgtcatcaccggcgttgcgtccatgcagagcgcgaaaacgggccaaatcactttcatggtcaaccctaagtaccgtgagcacctggccgcttgccaggcttctgccgttgtgatgacgcaggatgatttaccttttgcccatagcgccgcgctggtagtgcgtaacccctacctgacctacgcgcgcatggctcaaattcttgataccacgccgcagccggctcaggatatcgcgccgagcgcggtcatcgatccgtcggcgaagctgggtagcaacgttgccatcggcgccaacgcggttatcgaatccggcgtagtgctgggcgataacgtagttatcggcgcaggctgcttcgttgggaaaaatacgaaaataggcgccggctcgcgtttgtgggctaatgtgaccgtttaccatgagattgagatcggcgagaattgcctgattcagtccagcacggtgattggcgcggatggcttcggctacgctaacgatcgcggtaactgggtaaagatcccgcagttgggtcgcgtcattattggcgatcgcgtggagattggcgcctgcaccacgattgaccgtggtgcgctggacgataccgtgattggcaacggggttatcattgataaccagtgccagattgcgcataacgtggtgattggcgacaataccgcggtcgctggcggcgttatcatggcgggcagcctgaaaattggccgctactgcatgattggcggcgccagcgtgattaacggccatatggaaatctgcgataaggtcaccgtcacggggatggggatggtgatgcgtcctatcagcgaacctggcgtatattcctccggtattccgctgcagccgaacaaggcgtggcgtaaaaccgctgcgctggtgatgaatattgacgagatgagcaagcgcctgaaagcgattgagcgcaaggttaatcaacaagactaattcatcatttggtcacatgacatttccggcctgttgcattcgctaaaagattgccgcaggccgtgttattattgccttttagtacatttagacaggaagagtattttgactactgacactcatactctgcacattgaagagattctggaacttctgcctcaccgttacccgttcctgctggtagaccgcgtgctggattttgaagaaggtcgttttctgcgcgcagtaaaaaatgtttctgtaaacgagccgtttttccaggggcacttccctggtaagccgattttgccgggcgtcctgattctggaagcaatggcgcaagccaccgggattctggcgttcaaaagcgtcggaaaactggaaccaggcgagctgtactacttcgcgggtatcgatgaagcacgcttcaaacgcccggtagtaccaggcgatcagatgattatggaagtcactttcgagaaaacccgccgcggcctgacccgtttcaaaggcgttgcgctggttgacggtaaagtggtttgcgaagcgacgatgatgtgtgcgcgtagccgggaggcctgatacgtgattgataaaaccgcttttgttcatcctaccgccattgtagaagagggcgccgtgattggcgctaacgttcacattggtccgttttgtattgttggcgctaacgtcgaaatcggcgaaggcaccgtgctgaagtctcacgttgtcgttaacggccacaccaaaatcggccgtgacaatgagatctatcagttcgcttccatcggcgaagttaaccaggatctgaaatatgctggcgaaccgacccgggtggaaattggcgatcgcaaccgcattcgcgaaagcgtcaccattcatcgcggcacagtacagggcggtggattaacaaaggtgggcaacgataacctgctgatgatcaacgcccacgtggcgcacgattgtacgcttggcgatcgctgcattctggccaataacgcgacgctcgcgggccatgtttcgctggatgattatgtcattatcggcggcatgacggcggtgcatcagttctgcgtcattggctcacacgttatggttggcggctgctccggcgtggcgcaggacgttccgccgttcgtcattgcccagggcaaccatgcgacgccgttcggcgttaacatcgaagggctgaaacgccgcggcttcagccgggaagcaatcaccgcgatccgcaacgcgtataaactgctgtaccgcagcggcaaaacgctggaagaagccaagccggaaatcgccgaactggctgctcagcatcctgaggttcagctgtttgtcgatttcttcgctcgttctacccgcggcttgattcgttaatggctgaacagcgtcccctgacgattgccctggtcgccggagaaacctccggcgatattctaggcgctggtctcatccgcgcgcttaaagcacgcatcccgaatgcgcgctttgtcggcgtggcggggccgctaatgcaggcggaagggtgcgaagcctggtatgaaatggaagagctggcggtgatgggcattgttgaagtgctcggtcgcctgcgtcgcttactccatattcgcgccgatttgacccgccgcttcggcgagctgcgtcccgatgtcttcgtcggcatcgacgcccctgactttaatatcaccctcgaaggaaatctgaaaaagcagggcatcaaaaccattcactacgtcagcccgtcggtctgggcctggcgacaaaaacgcgttttcaaaatcggcagatccaccgatctggtgctggcctttctgcctttcgaaaaagcgttttatgacaaatttaacgtcccctgccgctttattggccataccatggcggatgcgatgccgctggatcctgacaaaggcgctgcgcgcgaccggttagggatcccgcacagcgtgcgctgcctcgctctgctacccggcagccgcggcgcggaagtcgaaatgcttagcgccgacttcctgaaaaccgcgcagcttctgcgcgccacctatcccgatctgcaggtggtggtgccgctggttaatgctaaacggcgggagcagtttgagcgtattaaagctgagacggcgccggatatgatcgtgcatatgctggacggtcaggcgcgcgatgcaatgatcgccagcgacgccgcgctgctggcctccgggacggcagcgctggagtgtatgctggcgaaatgcccgatggtggttggctaccggatgaagccgttcaccttctggctggcgaagcggttggtaaaaaccgactacgtctcgttaccgaacctgctggccggtcgcgaactggttaaagagctgctgcaggatgagtgcgagccccaggcgctggcagccgctctgcagccgctgctggccgatggcaaaaccagccatgagatgcatgagacgttccgcgccctgcatcagcagatccgctgcaacgccgatgagcaggcggcggacgccgtactggagttagcaaaacaatgatggagttcgtctatccgcatacccatctggttgccggcgtcgatgaggtcgggcgtggccccctggttggcgcggtggtgaccgcggcggtgatcctcgatccggcgaagccgattgtgggtctgaatgattccaaaaaactcagcgagaagcgtcgtctggcgctgttcgatgagattaaagagaaagcgctgtgctggagcctggggcgcgccgagccgcacgaaatcgacgagctgaatattctgcatgccactatgctggcgatgcagcgcgccgtcgccggcctgagcattgttcctgagtttgtcctgatcgatggcaaccgctgtccgtcgctaccgatgccctcccaggcggtggtgaaaggcgacagccgggtggcagaaatcagcgcagcgtctattctggcaaaagtcactcgtgacgccgaaatggccacgctggacctcgcatttccccactacggatttgcccagcataaaggctatcccaccgctgttcacctgcagaagctgcaggaacacggcgcaacagagcatcaccggcgcagttttggcccggtgaagcgtgccctgggcctggcgtccaactaagtcaccgggatctaaagatggctgaaccacgtttcgtacacctgcgggtgcacagcgactattccatgatcgatgggctggcaaagaccgggccgctggtgaagaaggcggcctcgcttggcatgccagcgctggcgatcaccgatttcaccaacctctgcggactggtgaagttctacgggacgggacacggcgcggggattaagccgatcgtcggcgccgactttcacgtgcagtgcgacctgctcggcgacgaatttaccgagctgaccgtgctggcggcgaacaacaccggctaccagaacctgaccctgttgatttcccgtgcctatcagcgcggctacggcgccctggggccgtggatcgatcgcaactggctggtggaacatcaggaagggctgattctgctctccggcggccggaaaggtgacgtcggcgtcagcctgatccgcggcaatatgccgctggttgaacagtgcgtcgccttctacgaagagcatttcccggaccgctattttctggagctgatccgtaccggtcgacaggatgaagaggcctatctccacgccgccgtggcgctggcggaagcgcgcggtctgccggtggtggcgaccaacgatgtccgcttccttgaaaccggcgacttcgacgcccacgaaatccgcgttgccattcacgacggcttcacgctcgacgatccgaaacggccgcgtaactactcgccgcagcaatatatgcgcagtgaggaggagatgtgcgagctgttcgccgacatcccggaagcgctggcaaacagcgtagaaatcgccaagcgctgcaacgtcaccgtgcggcttggcgaatatttcctgccgcagttcccgaccggcgatatgaccacggaagatttcctggtcatgaaatcgaaagagggtctggaagagcgtctggcgtttctgtttccggatccggaagagcgcgcaaagcgtcgaccggagtacgacgaacgtctggacatcgagctgcaggttatcaaccagatggggttcccgggctacttcctgattgtgatggagtttatccagtggtcgaaggataacggcgtgccggttggcccgggacgcggttccggcgccggttcgctggtggcctatgctctgaagatcaccgatcttgacccgctggagttcgacctgctgttcgaacgtttccttaacccggaacgtgtctcgatgcccgacttcgacgtcgacttctgcatggagaaacgcgaccaggttatcgagcacgtggcggatatgtacggccgcgacgcggtatcgcagatcatcaccttcggtaccatggcggcgaaagcggtcatccgcgatgtcggtcgcgtgctgggtcacccgtacggatttgtcgatcgtatctccaagctggtgccgcccgatccgggcatgacgctggcgaaagcctttgaggccgagccgcagctgccggagatctacgaggcggacgaagaagtgaaagcgctgatcgacatggcgcgtaagctggaaggggtgacgcgaaacgccggtaaacatgccggtggggtagttatcgctccaaccaaaatcaccgatttcgcgccactgtattgcgatgagcaggggctgcatccggttacccagtttgataagaacgacgtggaatacgccgggctggtgaaattcgacttcctcggtctgcgtacgcttactatcattaactgggcgctggagatgatcaacaagcgccgtgagaagaacggcgaagggccgctggatatcgccgccatcccgctggatgacaagaaaagcttcgacatgctgcagcgctcggaaaccaccgcggtcttccagcttgaatcacgcggcatgaaagatctgattaaacgcctgcagccggactgcttcgaagatatgatcgcgctggtggctctgttccgcccgggcccgctgcagtcggggatggtagataactttatcgaccgtaagcatggccgcgaggagatctcttatccggacgtgcagtggcagcatgaaagcctgaaaccggtgctggagccaacctacggcatcatcctgtatcaggaacaggtcatgcagattgcccaggtgctgtccggatataccctcggcggcgcggacatgctgcgtcgtgcgatgggtaagaaaaagccggaggagatggccaagcagcgttctatctttgaggatggggcgaagaaaaacggcattgacggcgaactggcgatgaaaatcttcgacctggtggagaaattcgccggttacggatttaacaaatcgcactccgccgcctacgcgttggtctcctaccagacgctgtggcttaaggcgcactacccggccgagtttatggcggcagtgatgaccgccgatatggacaacaccgagaaggtggttggcctggtggatgagtgctggcgaatggggctaaaaatcctgcccccggatattaactccggcctgtaccatttccacgtcaacgacgatggcgagatcgtctatggcattggcgccatcaagggcgtcggcgaaggaccgatcgaagcgattattgaggcgcgcaacaatggcggctatttccgcgagctgttcgacctctgcgcgcgaaccgatattaaaaagctcaaccgtcgggtgctggaaaagctgattatgtccggggcgttcgatcgtctcggcccacatcgcgcggcgctgatgaattcgctgggcgatgcgttgaaagccgctgaccagcacgcgaaagccgaggccatcggccaggctgatatgttcggcgtgctggcggaagagcccgagcaaattgagcaatcctacgccagctgccagccatggcctgagcaggtggtgctggatggtgaaagggagaccctggggctatacctcaccggacacccgattaaccagtatctgaaggagattgagcgctacgtcggcggcgtgaggctcaaagacatgcatccgaccgaacgtgggaaagtcaccacggcggcggggctggtgattgcggcgcgggtaatggtcaccaagcgcggcaatcgtatcggcatctgtaccctggatgaccgttccgggcggctggaagtgatgttattcaccgacgcgctggataaatatcagcagttgctggaaaaagaccgcatacttatcgtcagcggacaggtcagctttgatgactttagcggggggcttaaaatgaccgcccgtgaagtcatggacattgacgaagcccgggaaaaatatgctcgcgggcttgctatctcgctgacggacaggcaaattgatgaccagcttttaaaccgactccgtcagtctctggaaccccaccgttcgggaaccattccagtgcacctctactatcagagggcggatgcacgcgcgcggttgcgtttcggcgcaacatggcgcgtctctccgagcgatcgtttacttaacgatctgcggggccttatcggctcggagcaggtggaactggagtttgactaatacaggaatactatgagtctgaatttcctagattttgaacagccgattgcagagctggaagcgaaaatcgattccctgactgcggtaagccgtcaggatgagaaactggatattaacatcgacgaagaagtgcatcgtctgcgtgagaaaagcgtagagctgacgcgcaaaatcttcgccgatctcggtgcatggcaggttgcgcaactggcgcgccacccgcgccgtccttacaccctggattatgtccgcctggcgttcgacgaatttgacgaactggccggtgaccgcgccttcgctgacgataaagcgattgtcggcggtatcgcgcgtcttgacggtcgtccggtgatgatcatcggccaccagaaaggtcgtgaaaccaaagagaaaattcgccgcaactttgggatgccggcgccggaaggctaccgcaaagcgctacgcctgatggagatggctgagcggtttaaaatgccgatcatcacctttatcgacaccccgggcgcctacccgggcgtcggcgcggaagagcgtggccagtcggaagcgatcgcccgcaacctgcgtgagatgtcgcgtctgagcgtgccggttatctgcaccgtaatcggtgaaggcggctccggcggcgcgctggcgatcggcgtgggcgacaaggtcaacatgctccagtacagcacctattcggtcatttcgccggaaggctgcgcctccattctgtggaagagcgcggataaagcgccgctggctgcggaagcgatgggcattatcgccccgcgtctgaaagagctgaagctgatcgattctatcgttctggaaccgctgggcggcgctcaccgcaacccggaagcgatggcagcgagcctgaaggcgcagctgctggcagacctggcagacctcgatctgctcagcgaagaagagctgctgaaccgccgctatcagcgtctgatgagctacggttacgcttaactttttcgtcaggactaaacactaagggccggattttccggccctttttttatgtgcgatgcgcccgggggattgctatgatgcttgacttaggtgaataccaggaggaaagcgtgaatatcatcgccatcatggggcctcacggcgtctaccacaaagacgagccgatcaaagaactggaagcggcgctgcagcgccagggcttccagaccatctggccgcaaaacagcgccgacctgctgcagtttatcgagcacaacccgcgcatctgcggggtgatcttcgactgggatgaatacagcgtcgatctgtgcagcgatatcaatcagctcaatgaataccttcctctgtacgcctttattaacgcccactcgacgatggatgtcagcagtcaggatttgcgcatgacgctgtggttcttcgaatatgcgctgggactctccgaagagatcgccacccgcattgggcagtacacccgcgagtacctggagaatatcactccgccgtttacccgcgcgctgttcaactatgtccaggagggaaaatataccttctgtacgccgggtcatatgggcggcagcgcctatcagaaaagcccggtgggctgcctgttctatgatttttttggcgggaatacgctgaaggcggatgtctcgatttcggtcaccgagctgggctccctgctggatcataccggcccgcacctggaggcggaggagtatatcgcgcgcgcctttggcgccgagcaaagctatatggtgaccaacggcacctcgacgtccaataaaattgtcggcatgtactcggcgcccgccggcagcaccctgctgattgaccgtaactgtcacaaatcgctggcccacctgctgatgatgagcgatgtggttcccctgtggctgaagccgacccgcaacgcgctggggatcctcggcggtatcccccggcgcgaatttacccgcgacagcattcagcagaaagtgcgcgacacgggcggggcgcagtggcccgtgcatgcggtgatcaccaactccacctacgatggtctgctctataacaccacctggcttaaggagacgctcgatgtcccgtcgatccatttcgattccgcctgggtgccctatacccatttccatccgatatatcaggggaaaagcggtatgagcggggagcggatccccgggaaagtcatcttcgagacgcagtcgacgcataagatgctggccgcgctgtcgcaggcctcgctgatccacattaaaggcaactatgatgaagagacctttaacgaagcctttatgatgcatacctctacgtcgccgagctaccccatcgtcgcgtcgattgagaccgcggcggcgatgctgcgcggcaactccggtaaacgtctgatccagcgctccattgagcgggcgctggacttccgcaaagaggtgcagcgactgcgcgaggagtcggacggctggttctttgatatctggcagccggaagccgtggataaagccgagtgctggccggtagcgccgggcgaggactggcacggtttcaaagatgccgatgcggatcatatgtatctcgatccggtgaaggtcaccattctgacgccgggcatggacgagcaggggaatatggatgaagaggggatcccggcggcgctggtggcgaagttcctcgacgaacggggcgtggtggtagagaaaacaggcccctacaatctgctgttcctgttcagtatcggcatcgataaaacccgggcgatggggctgctgcgcggcctgaccgagtttaaacgcgcctacgatctcaatctgcgggtgaaaaatatgctgccggatctgtacgccgaagatcccgacttctaccgcaacatgcggatccaggatctggcgcaggggatccaccgcttgatccgtcagcatcagctgccgcagctgatgctcagcgcctttgacgtcctgccggaaatgaaaatgacgccgcatcacgcctggcagcgccagatcaagggggaggtggaaactattgaactggagaacctggtggggcggatttcggccaacatgatcctcccttatccgccgggggttccgctgctgatgccgggagagatgatcaccgaggaaagccgggcggtgctcgattttctgctgatgctttgctctatcggccgtcattacccgggctttgagaccgatattcacggcgccaagcgcgatgaggacggtgtgtatcgggtacgagtcttaaaaaatgacgaaaggcttgcgcgttaacggcgcgcacgagtaacgtggctggcttaacagaaggagtttaaccatgctgggtttgaaacgggttcaccatattgccatcattgcgaccgactacgcccgcagtaaagcgttctattgcgatattctggggtttacgctgcaaagtgagttttatcgcgccgagcgcgattcctggaaaggcgatctggcgctcaacggcgagtatgtgattgagttgttctcgttcccgtttccgccagcccgccccagtcgtccggaagcctgcgggctgcgtcatctggcctttagcgtggatgatatcgacgccgcggtagcccatctcaccgcgcatggcgtggagtgcgaagcgattcgtgtcgatccctttaccggtaaacgctttaccttctttagcgatccggacgacctgccgctggaaatatatcagcagtaaatcttgccagcgcggccctggcccggtaacgtgccgggccatcacttctcggtatgttcgtggatatgacggctgatattgcgcatacgcttcatccccatcgccagctgctggtggccttcagcggcggtctggactcgacggttcttctgcatcagctggtgctgctgcgggaacaggatccctcgctgacgctgcgggcggtgcatgttcaccacggccttagcgcccacgcagacgactgggtggcgcattgtcggcagatttgccagcagtggcaggtgccgctggtggtgcatcgcgtgacgttagcccggggagggctgggcgtcgaggcccacgctcgtgcggcgcgctatcaggcctttcaggatacgctcaatgccggcgaggtgttagtgaccgcccagcaccaggacgatcagtgcgaaaccctgctgctggcgttaaaacgcggcagcggtcctaccggcctgtcggcgatggcgccatcctctgcctttgccggcagtcgactactgcgtcctctcctcaatgaaacccgcgaatcactacgccagtgggcgctcgcccatcagctgtcgtggatcgaagatgagagtaatcaggatgatacctatgaccgcaatttcctgcgcctgcgggtgatcccggtgctgcgcgagcgttggccgcactttagcgaggccgtcgcccgcagcgccagcctgtgcgccgagcaggaacaactgctggacgagatgttggcggcggagctggcgtcgctggtggccgaagatggctcgctggctatcgcgccgctggcgacgatgagtccgccgcgccgagcggcgctgctgcgtcgctggctcgccgggcagcaggcgccgatgcccgcccgcgaggtgcctgagcgcctctggcacgaggtggcgctggcgcgggaagatgccagcccctgtctgcggctgggggaatttaccgtccgccgttttcaacagcgtttgtactgggtgaagtatcttcccggtcagacggacagcgttcagcgctggcccgactggcgccagccgctgcggctggcggacggtctcggcgagctgacgctgcggcccggcggcaagttgcgcccgccgtcggcggatgagccggtcaccgtccgctttcgcgccagcggccacctgcatattgtcgggcgccatggcggacgcaagcttaagaagctctggcaggagctgggcgttgctccgtggcgacgagacaccacgccgctgctgttttacggcgaaacgccgattgccgcagcggacgatctgtttgtgaccacagaaggtgaagtgaaggacggggaaggggtcaggctgatgtggaggaaaacgggcgattaagcccgtttttgattcaggattcgctcaccaccacggtgccgatttccgggtgactgaagctggcgattttatccaggcgcagctcgcggacgttgccggcgagttcgaccaccagatactcgatattttttcgcgagataagatcgctggcctttgcctgcagctgttcgccatccttcagcgccagcgtcagcaccaggtgatgctggcaggccagctccaggttgtcgtaatcatcgcagttaatgggttgataagtatcattcattgacataatcgctcaccagtaagtttgctgccgcataagcggccttttccctgactgactccgaaagggcctcatccgccgcaatctcattcaatactttcaacacgcaacccagcgcatccgggatataccctaagtctccgctggctatttccgcataccgcttgcgtattaactcacaatagtggtccacatgccctcctgtcagcgttctgactcaaccgtgggatgcaagtttaagcctacgaagataaactctgtttagcaagggaactatatcatagtcatttaagcaatttcagcaggatgaaacaggttgctgcgattgacgacagccttttgccgccagtttcgctacaatgtacgccattcttttcaggagtttattcatggcgctgaaagcgacaatatataaagctgcggtaaatgtagccgatctggatcgcaaccagtttctggatgctaacctgacgctggctcagcatccgtcagaaacccaggagcgcatgatgctgcgcctgctggcatggatcaaatatgccgatgaacggctacagtttacccgcggtctgtcgtcggatgacgagccggagctgtggctgcttaacgatcatctcggggtcgatctgtggatcgaactgggcctgccggatgagcggcggattaagaaagcctgctcacgggcgcaggcggtggcgctgtttgcctataatagccgggcagctgaaatctggtggcagcagaatcagagcaagcttgcggcgtacccgaagctgaccatctggtatcttgatgatgcgcaactggcactgcttagcgcctttgccgatcgtaccatgacgctgcaggccactctgcaggagggcagtatctggttatccgacgctcggaataatcttgaaattcagcttaccgcctggcaagcgtcggcatgattactattagccgcagcgtagcccttgccgacgacgagatcgtcttgtcaggcattcgcgcccagggagcaggggggcagcatgtgaacaaagcgtcgacggcgatccatctgcgctttgatattaaagcttcaagcctgccggagttttacaaagagcgcctgctcgccgccagccaccacttaatttctgctgacggtgtggttatcattaaggctcaggaataccgcagccaggagatgaaccgtgaagcggcgatcgcccggctggtggcccttattaaagaattaaccgcagtgcaaaaaagtcgccgggagacgcgaccgactcgggcatcgaaagagcgacgccttgcttccaaggcacagaagtcctcagtcaaggcgctgcgtgggaaagttcgccagtgaaggcgtcggcgaacgggtgaaatggatgataaggaaagcaaagtgaagaaaatcgtattctccgtgatagcggcctgttcgctgttcgcgctgtttggttgtaaccatcgcgccgagactgacacggtccagccagcggcgatggaagagctcaagccgatgcagcaaagctggcgaggcgtgctgccttgcgcggattgcgaaggtatcgacacctcgctgttcctggaaaaagacgggacctgggtgatgaatgagcactaccagggcgcccgtcgtgagccgtcatcctttgcctcgtacggcacctgggcacgtaccgcggataagctggtgctgaccaacagcaagggcgagaaatcttactttcgcgcgaaaggcgacaagctggagatgctcgaccgcaacggaagccccattcagtctcctctcaactataccctggagccagtgaaggccagcctgccgacgacgccgatggcgatgcgcggcatgtatttctatatggccgatgcggcaacctttaccgattgcgcgaccggtaaacgcgtcgcggtggcgaacaatgcccagcttgaacgggattatgccgccgcgcgcgggaccgatactcgcccggtactgctggtggtagaagggcactttactctcgaagcgaacccggataccggcgagatgatgaaaacgctgatgacggatcaagccggcaaatttattcccggtaaagactgcagccattgattgtcaggcccctgtccgggtaacgggcaggggatgatcccgcgcagtaccacctacttcctcctgttattagccctgtcacatcaagagtgagcgtggatctggctggcggaaaagcgtcaatcgtttctttactccgcaccgtccttcggtttgttcagccccaccagcttaccggcctgaagataaactcccagtttcaaatgcccgacatactggagctgcgtttcgggtttaaacgtggcgacgtctccttcccgcatgtgcagcagatcggaaggactgatccacgccgcctgcgcgagcgtcagcggatgcccggctcggacaaaggcctcgctgacaaactccgagcaaaaccacgctttcttgtcgccgcttgccgcatcgcccagctgcgctttagccaggccactgacgcactgctggcgaaagtctcgtgagaaggggttgagcgagcagagcggtttggtgaccatataagggataaactgaataatgccgcgatagttatacccgctgtctttgacctgccaggcaaaacttttcatcgtcgttgcctggtccggcgtcaggtcaggcaccctgagagcaaagagtttatcgctgtgcgccagcgcctgctgaagggtaatcacttgtacgccggcgccggtggcttccgcaacctgaccttcgccaacatacagcgcgacgtggcttacggaagaggcgctgaaggcgcggatcccaagcgatgtgacgcccaggctggaggagaacagcaggtcgccggagcgcaggtcgctttcggcgatttcgcgcagtccgctgccggcaatcgagctttgacgctggagggtaacagcccaggatgatgaatggtcatcggcagcagatgtggaaggcgagctgcggccgacgtccaaggtacaggcggtaagtaggagcagggcaaaagtaagcagtccgctgcggaggagatgtgcagtcattggtactgtccttgtaaaaaaaaaggccctgacatccgttcagggccctgaggtgggtgttagccttttatcgctttaaccagatattccacaatatccccggtcttaatcagctgcttctcaccgttgcgacgatacttgtattcgatatcatcgttgtcgaggttacgatctcccagcacgatggtgtgcgggataccgatcagctccatatcggcgaacatcacgcccggacgctctttacgatcgtccatcagcacttcaataccctgggcgctcagctcggcgtacagtttctccgccagctcctgcacacggtaagacttgtgcatgttcatcggcaggatcgccacctggaacggcgcaatcgcatccggccagacgataccgcgatcgtcaaagttctgctcaatcgccgccgctaccacgcgagtcaccccgataccatagcagcccatggtcaggatctggttacgcccatcttcgccctggaccgcggctttcatcgcctcggagtacttcgtccccagctggaagatatgacccacttcgataccgcgcttaataagcagggtacctttaccgtccgggctcgggtcgccggcgacgacgttacggatgtcggccacttccggcgtcgcgacatcgcggtcccagttgatgccgaagtagtgtttgccatcgatattggcgccagcggcgaaatcgctcatcaccgctacagtacggtcgataatcaccggaaccggcatgttcaccgggcccagggagcccggaccggcgttcaccagggcgcggatctcttcttcggtggcgaaggtcagggggctggcgacctgcggcagtttttccgctttcacttcgttcagctcgtgatcgccgcgcaccagcagggcaaccagcggggaagcgctatcttcaaccgctttcaccagcagagttttcacggttttttcgatcggcaggttgaactgctccaccagctcagcgatggttttggcgttcggcgtatcgaccagggtcatctcctgggtggcggctgcgcgcggctctttcggcgcaacggcttccgcaaactcgatgtttgccgcgtagtcggagctgtcggagaagatcacatcgtcttcgccgctctgcgccagcacctggaattcatgagaggcgctgccgccgatagaaccggtgtcagcctgtaccgcgcggaaatccagccccatacggctgaagattttactgtaagcggcatacatcgcgtcgtaggtttcctgcagcgattcctgcgaagtatggaaagagtaggcatctttcatcaggaattcacgggagcgcatcaccccgaaacgcgggcgtacttcgtcgcggaatttggtctggatctgatagaagttcagcggcagctgtttataggagttcagctcgttgcggatcagatcggtaatgacctcttcgtgggttgggccgaggacgaacggacgatcgccgcgatcggcaatgcgcaacagttccgggccgtactgctcccagcgcccgctctcctgccacagttcagatggctgaacgaccggcattaacacctcgatcgcaccggcgttgttcatttcttcacgcacgatgttttcgacttttttcaggacgcgcacgccggtcggcagccaggtgtataacccggaggccagcttgcggatcatcccggcgcgcagcatcagctgatggctgattacctcggcgtcggcaggtgtctccttcagagtggagagcagatattggctagtacgcatgttgtaacggttccagttaaacgagcggaacaggctggttgcccagcctgaaacaaaaaaagtggtttagtttaccagtgtggcaaagatgccaaaagagaggaaaataaaattagcgcgcttcgagggcaaagacttcaaaaccggaggcagtcacccgccagcggacgttgaaatccagcagccagacggcatacgtttttcccgcttgttcctcttttcggtaggccggacgcggatcctgcgccagcacctcgcggataaacgctttgatatgtgggtagcgtttttccagcgtgagtaactgtgcgtctatttccggcgtaaagctgacgttcatacccgccagcggcgcctgctgtgcatagctggcgctggcgtccggcagggcttcggcgaaaggaagatacggtttgatatcaaccaccggcgtcccgtcgacgagatcgaggctgccgagttccagtattacctgatctttctgacagcgaatgcccttgagctcaacgagcgacatgccgatgggattagggcgaaacgttgaacgggtggcgaagacgcccatccgcgcattgccgcccagtcggggaggtcgcaccgtcggacgccaaccgccttccattgtctgatgaaacacaaacaggatccacagatggctgaagctctccaggccacgcacggcgtcggcctggttatagggcgcgaccagatggagttctccgccgccgtgtttcaccaggcctggctggcgaggaacggcaaacttctctttatacggcgaacggatgacgcctatttgcgcgaactgaaatgcgctcattgcgccgagacgttaagcgctgaacccaggcaaacggcctgacggtagcagcctggcgtaccgctggtcacttcgcagcggtgaagcaggacggcattagctttcatacgcgcggcattaatttgcaggcgcttgcgcgcggtggggatattcggcggagaatcctgattcgaagcctggcaggactcgccagatacttcacccagatcgcggaacggtttaccaaccagctctgacgcatcggtgtaaatacgtactggggccgggcgggtggcgcgcggtttgctcggctcagatttaaccggcggggttgcagtgctttgagcaggctcaacgggagatctgcttagcatggaacaaccgcttaacatgagtgctaacaaacagatcggtaaagcacgcatagtatttcctcaatgaataaaaaacagggcgttattgaatcaggtgcttgcataaatgacaagacgggcgtgaagcccgtcctgaatgatattacggtgagaaaagattaccagcctttcacggcaccgccgttaaagatcttgtttgctgcttcgtaaacttcatcgctctggtaagcctgaacgaattttttcacattctcagcatctttattgtcttcacgcgccacaatcaggttcacgtaaggagactctttaccttcaacaaagatgccgtctttcgccggggtcaggccaatctggctggcgtaagtggtgttgataacggccagcgcaatctgcgcatcgtccagggaacgcggcagctgcggcgcctccagttcaacaatcttcaggtttttcgggttctcgacgatgtccagcgaggtcggcagcaggcccacgccgtctttcagtttaatcagacctacctgctgcagcagcagcagagaacgaccgaggttggtcggatcgttagggacggcgatctgcgagcccggctgcagttcgtccagcgatttgattttcttcgaataacccgcgatcgggtagacgaaggtgttaccgacagccaccagcttatagccgcggtctttaatctgctgatcgagatacggtttatgctggaaggcgttcacgtcgatatcgcctttgctcagcgcttcgttcggcagaacgtaatcgttgaaggtcaccagttctacgtcaaggccatacttctcttttgctactttctgcgcaacttcagcgacctgctgttccgccccgacgataacgccgactttaatatgattcggatctttttcatcctgaccgcaacccaccagcgccagagaaccgattaacgcgccgactgccgcaaaagttttgaaattaaaggccatgttatttccttcctgtaagaatgagtgttgtctgccaataacgttatttgtgagtcacagcccggacgatgcgatcgccagagaattgaattaaataaaccagaacaaccagcaataccagtacggtattcatcacggtggcgttatatccaatatagccatactgataaccaatctgacccaggccaccggcgcccaccgcgccgcccattgcggaataacccaccagcgtgatgagcgtgatggtggcggcgttgactagacccggcagtgcttcaggtagcaggactttgcgcacgatctgcagcggcgtggcacccatcgcgcgggaggcttcaataaggccggtggggatttccagcagggcgttctccaccatgcgggcgataaacggcgcggcgccaactgttaatggcacaatcgctgcctgcaggccgatagaggtaccgacgatcacgcgggtaaacggaatcatccagaccagcaggataatgaacgggatggagcggaaaatattcaccagcgccgacagcgtgcggtacagtttggcattggcgacgatttgccccggacgggtcacgtacagcagcacgcccaccggcaggccgaggacaaaaccgaagaagccagagacaaaagtcattgccagcgtttcccatacgccgcgcaacagcagccacatcattgcctcagacataacccaatacctctacttttacatgatgttcctgcagccaggcgatggccgcctgagtgtcttcctgtgtaccgtgcatttcggtgagcatgatgccgaacttcaccccgccggcataatccatctgcgcgctgataatgttgttattcacgttgaagcgacgcgcggtttcagagagcagcggcgcatcgacggagtggccggtaaattccatgcgcagcatcggtacgctatccgctgtggcggtaggtttcaggcgcgcctgatagtcatccggaatatcgaggtgcagagtggactgaataaactgctgagccagcggcgtcttcggatgggagaagacttcgctcacggtgtcctgctcgatcagttgaccattactaatgaccgccacgcagtcgcagatacgtttaaccacgtccatttcatgggtgatcaacaggatggtcagtcccaggcgacggttaatgtctttcagcagttcgagaatggaacgggtagtggccggatccagggcgctggtggcttcatcgcacagcaatactttaggattgctggccagcgcgcgggcaatcgccacgcgctgtttctggccgccggagaggttggccgggtagctgtcgtgcttatcacccaggccgacaagatccagcagctccgtgacacggcgtttgatttcagcctgcggcgtgttatccagctccaggggtaatgccacgttgccgaaaacggtccgcgaggccaacaggttaaaatgctggaaaatcatgccaatttgacggcgagcgcgggttagctctttctccgacagggcagtcagttcctgaccgtcaacctgtacgctgccctcggtcgggcgctccagcaggttcacgcagcgaatcagcgtacttttaccggcgccggaggcaccgatgacgccgtaaatctgtccggcagggacatgcaggctgacgttattcagcgcctgaatgctgcgattcccctgctggaatactttggtgatattggaaagtttaatcatcagttatttattatcgtttagccgtttgccgtggcattttcttctgccgtatccaggcgatgcctggcaatgaaatggatgttaaggcatccagacgtctaaatcaatctgactctttataatgagcactttcttgcatgcggaaacatgcgatactagcggcactagtctttttcaggagcaaaccggtggcaaagtcagtacccgcaatttttctcgaccgtgacggcactattaatgtcgatcatggctacgtccacgaaatcgacaattttgaatttatcgatggcgtcattgacgcgatgcgcgaactaaaagagatgggctacgcgctggtgctggtcactaaccagtccggtattgcccgcggtaaatttaccgaagcccagtttgaaacgctgaccgaatggatggactggtctctggcagaccgcggcgtcgacctcgacggtatctactattgcccgcatcacccgcagggtgcggttgaggagtaccgccagacctgtgattgtcgtaaaccgcatccggggatgctgatttccgcccgcgactatctgcatatcgatatggctgcttcttatatggtaggggacaaactggaagatatgcaggcggcagcggctgcggatgtcgggactaaagtactggtgcgcaccggtaagcccctgactgaagaagcggaaaaagcggcggattgggtgctaaatagcctggcagagctgccggcggcgattaaaaagcagcaaaaataagcgttgcgtttaaaagatgagcggttgaaataaaattgtatttttccgcttgtcattcccggagagctccctataatgcgcctccatcgacacggcagatgtgaatcacttcacacaaacagccggttcggttgcagagaaaaatcctgaaaaacgggttgactctgaaagaggaaagcgtaatatacgccacctcgcgacagagcgctaaagcgcgtcgcaactgctctttaacaatttatcagacaatctgtgtgggcactcaaagtgacatggattcttaacgtcctaggacgaaaaatgaataccaagtctcaagagtgaacacgtaattcattacaaagtttaattctttgagcatcaaacttaaattgaagagtttgatcatggctcagattgaacgctggcggcaggcctaacacatgcaagtcgagcggtagcacagagagcttgctctcgggtgacgagcggcggacgggtgagtaatgtctgggaaactgcctgatggagggggataactactggaaacggtagctaataccgcataacgtcgcaagaccaaagtgggggaccttcgggcctcatgccatcagatgtgcccagatgggattagctagtaggtggggtaacggctcacctaggcgacgatccctagctggtctgagaggatgaccagccacactggaactgagacacggtccagactcctacgggaggcagcagtggggaatattgcacaatgggcgcaagcctgatgcagccatgccgcgtgtgtgaagaaggccttcgggttgtaaagcactttcagcggggaggaaggcggtgaggttaataacctcatcgattgacgttacccgcagaagaagcaccggctaactccgtgccagcagccgcggtaatacggagggtgcaagcgttaatcggaattactgggcgtaaagcgcacgcaggcggtctgtcaagtcggatgtgaaatccccgggcttaacctgggaactgcattcgaaactggcaggctagagtcttgtagaggggggtagaattccaggtgtagcggtgaaatgcgtagagatctggaggaataccggtggcgaaggcggccccctggacaaagactgacgctcaggtgcgaaagcgtggggagcaaacaggattagataccctggtagtccacgccgtaaacgatgtcgatttggaggttgtgcccttgaggcgtggcttccggagctaacgcgttaaatcgaccgcctggggagtacggccgcaaggttaaaactcaaatgaattgacgggggcccgcacaagcggtggagcatgtggtttaattcgatgcaacgcgaagaaccttacctggtcttgacatccacagaactttccagagatggattggtgccttcgggaactgtgagacaggtgctgcatggctgtcgtcagctcgtgttgtgaaatgttgggttaagtcccgcaacgagcgcaacccttatcctttgttgccagcggtccggccgggaactcaaaggagactgccagtgataaactggaggaaggtggggatgacgtcaagtcatcatggcccttacgaccagggctacacacgtgctacaatggcatatacaaagagaagcgacctcgcgagagcaagcggacctcataaagtatgtcgtagtccggattggagtctgcaactcgactccatgaagtcggaatcgctagtaatcgtagatcagaatgctacggtgaatacgttcccgggccttgtacacaccgcccgtcacaccatgggagtgggttgcaaaagaagtaggtagcttaaccttcgggagggcgcttaccactttgtgattcatgactggggtgaagtcgtaacaaggtaaccgtaggggaacctgcggttggatcacctccttaccttaaagaacctgcctttgcagtgctcacacagattgtctgatgaaaatagagcagtaagtaatctctgcaggcttgtagctcaggtggttagagcgcacccctgataagggtgaggtcggtggttcaagtccactcaggcctaccaaatttgcgaagcaaatttgaagaggttgcaaacgatggggctatagctcagctgggagagcgcctgctttgcacgcaggaggtctgcggttcgatcccgcatagctccaccatctttactgcgaacacaagaaaacttcagagtgaacctgaaaaggtgcactgcgaagttttgctctttaaaaatctggatcaagctgaaaattgaaacgacacactgtttaagtgtgttcgagtctctcaaattttcgcgacacgatgatgttttacgaaacatcttcgggttgtgaggttaagcgactaagcgtacacggtggatgccctggcagtcagaggcgatgaaggacgtgctaatctgcgaaaagcgtcggtaaggtgatatgaaccgttataaccggcgatgtccgaatggggaaacccagtgcaattcgttgcactatcgttaactgaatacataggttaacgaggcgaaccgggggaactgaaacatctaagtaccccgaggaaaagaaatcaaccgagattcccccagtagcggcgagcgaacggggagcagcccagagtctgaatcagcttgtgtgttagtggaacggtctggaaagtccgacggtacagggtgatagtcccgtacaccaaaatgcacaggctgtgaactcgaagagtagggcgggacacgtggtatcctgtctgaatatggggggaccatcctccaaggctaaatactcctgactgaccgatagtgaaccagtaccgtgagggaaaggcgaaaagaaccccggcgaggggagtgaaaaagaacctgaaaccgtgtacgtacaagcagtgggagcaccttcgggtgtgactgcgtaccttttgtataatgggtcagcgacttatattctgtagcaaggttaaccgtataggggagccgcagggaaaccgagtcttaactgggcgttaagttgcagggtatagacccgaaacccggtgatctagccatgggcaggttgaaggttgggtaacactaactggaggaccgaaccgactaatgttgaaaaattagcggatgacttgtggctgggggtgaaaggccaatcaaaccgggagatagctggttctccccgaaagctatttaggtagcgcctcgtgaactcatcttcgggggtagagcactgtttcggctagggggtcatcccgacttaccaacccgatgcaaactacgaataccgaagaatgttatcacgggagacacacggcgggtgctaacgtccgtcgtgaagagggaaacaacccagaccgccagctaaggtcccaaagtcatggttaagtgggaaacgatgtgggaaggcacagacagccaggatgttggcttagaagcagccatcatttaaagaaagcgtaatagctcactggtcgagtcggcctgcgcggaagatgtaacggggctaaaccatgcaccgaagctgcggcagcgacactatgtgttgttgggtaggggagcgttctgtaagcctgcgaaggtgtgctgtgaggcatgctggaggtatcagaagtgcgaatgctgacataagtaacgataaagcgggtgaaaagcccgctcgccggaagaccaagggttcctgtccaacgttaatcggggcagggtgagtcgacccctaaggcgaggccgaaaggcgtagtcgatgggaaacaggttaatattcctgtacttggtgttactgcgaaggggggacggagaaggctatgttagccgggcgacggttgtcccggtttaagcatgtaggctgattgtccaggcaaatccggataatcaaggctgaggtgtgatgacgaggcactacggtgctgaagtaacaaatgccctgcttccaggaaaagcctctaagcatcaggtaacattaaatcgtaccccaaaccgacacaggtggtcaggtagagaataccaaggcgcttgagagaactcgggtgaaggaactaggcaaaatggtgccgtaacttcgggagaaggcacgctggtgtgtaggtgaagtccctgcggatggagctgagaccagtcgaagataccagctggctgcaactgtttattaaaaacacagcactgtgcaaacacgaaagtggacgtatacggtgtgacgcctgcccggtgccggaaggttaattgatggggttatccgtaaggagaagctcttgatcgaagccccggtaaacggcggccgtaactataacggtcctaaggtagcgaaattccttgtcgggtaagttccgacctgcacgaatggcgtaatgatggccaggctgtctccacccgagactcagtgaaattgaactcgctgtgaagatgcagtgtacccgcggcaagacggaaagaccccgtgaacctttactatagcttgacactgaacattgagccttgatgtgtaggataggtgggaggctttgaagcgtggacgccagtctgcgtggagccaaccttgaaataccaccctttaatgtttgatgttctaacgttggcccctgaccggggttgcggacagtgtctggtgggtagtttgactggggcggtctcctcccaaagcgtaacggaggagcacgaaggttagctaatcctggtcggacatcaggaggttagtgcaatggcataagctagcttgactgcgagcgtgacggcgcgagcaggtgcgaaagcaggtcatagtgatccggtggttctgaatggaagggccatcgctcaacggataaaaggtactccggggataacaggctgataccgcccaagagttcatatcgacggcggtgtttggcacctcgatgtcggctcatcacatcctggggctgaagtaggtcccaagggtatggctgttcgccatttaaagtggtacgcgagctgggtttagaacgtcgtgagacagttcggtccctatctgccgtgggcgctggagaattgaggggggctgctcctagtacgagaggaccggagtggacgcatcactggtgttcgggttgtcatgccaatggcactgcccggtagctaaatgcggaagagataagtgctgaaagcatctaagcacgaaacttgccccgagatgagttctccctgagactttaagtctcctgaaggaacgttaaagacgatgacgttgataggccgggtgtgtaagcgcagcgatgcgttgagctaaccggtactaatgaaccgtgaggcttaaccttacaacgccgaagatgttttggcgatttgagagaattttcagctctgatacagattaatcgatacgttggtgaaacgtgttgataaaacagaatttgcctggcggcactagcgcggtggtcccacctgaccccatgccgaactcagaagtgaaacgccgtagcgccgatggtagtgtggggtctccccatgtgagagtagggaactgccaggcatcaaattgcagtaagccggggtgacaaccggtggtaataaagcgaagaaattcggtggagcggtagttcagtcggttagaatacctgcctgtcacgcagggggtcgcgggttcgagtcccgtccgttccgccacttattaagagccctgagcatttgctcagggcttttttgtttgatctgttctctattattgctaattcagcaaaaatcctctgcattaatcgctctttttcccctccacaccatcagccataatttcatccgttaaccgaaatgaataaataacgaggaaaatcatggcaatccctgcatttggtcttggcaccttccgtctgaaagatgatgttgttatcgcatccgtaaaaaccgcgctggagctgggctatcgtgctatcgacaccgcgcaaatctatgacaacgaagccgcggtgggtcaggctatcgccgaaagcggcgtgccgcgtgatgagctgttcatcactaccaaaatctggatcgagaacctgagcaaagacaaactcatcgccagcctgcaagaaagtctgcagaagctgcgcacggactatgttgacctgacgctcatccactggccggcaccgaacgatgcggttgccgttgaagagtttatggcagccttgatggaagcgaagaagctgggtctgacccgtcagattggtatctccaacttcactattccactgatggagcgcgcgattgccgccgttggcgctgaaaacattgcgaccaaccagattgaactctcgccgtatctgcaaaaccgtaaagtcgtcgactgggcacgtgagcacggcatccacatcacctcttacatgacgctggcttatggtaaggcgctgaaagatgaagtgattgcccgtatcgcggcgaaacataatgcgactccggcgcaggttatcctggcatgggcgatgggcgaggggtacgcggtgatcccgtcctcgacgaagcgtgataacctggccagcaacctgaaggcgctggatctgcagttggatgatgaagatcgacaggcgatcgctgcgctggattgcaacgatcggctggtgagcccggaaggtctggcgccgcagtgggattaatcactcgctaccggtatgccgttcgccttgcagaccgagatggtattacgacagctccttcgggagctgttttacgtggtcgctcagaaaatcaataaatgccctgatgcgagtgctgaccgcccggtcgctgtaatagacggcactgaaaggcatttccaccggtaagcgcttatccgccagtagctcgacaaactctccgctggcaatctctttatccaccatgtaatccgacaggcaggcaataccgttgccggtcaggcacagctgcttgagcgtttcgccgctattggatgacaccgccgcttcgatctctaacagctggccatcgcaacaggagaccggccaggtattcagcgataccggctcggtgaagccgaggcagtgatgctgtttcagatcggatggatgctgcggcataccgtagcgcgcgacatagtcgggcgaggcgacgatcttacgatagctggtaaacagcggtcgggcgcgcaggctggaatccgttaaggtcccggcccgaatggccacatccactttccgttcaatcagattgataaacgtctcagacgagacgagcgacagcgtcatttccgggtagcgctcgcgaaatggcttcaccagcggcatgagaaaatgcagcatcaccggcgtcgcggcatctacccgcagcaggccccgcggcgtcgtgcgcgtctccagcagatcgttctctgccgccgccatttcctgcaagaccacctgcatacggcgaaaatagcgctcgccttcttctgtcaggctgagctggcgggtggtccgattgagcaggcttacgcctagctttgattccagctttttgaccgcccggctgacggcggagttggcctgtccgagctgctcggccgcccggctgaaactcccgctttccaccaccgccacaaagatggcgatctcctctgatgtggctctcattattgcacctatagcaaaattctattgatactttgatagtttttgttatttatacaacccttcatactacgtgtcatcttaatcctgatgctacggagtaaattatgccactggcgctatttgccttaaccatcggtgccttcgcaattggcaccactgaatttgtgattgtcggcctggtcccgaccattgctcagcaactctctatctccctgccttcggcgggactgctggtctctatctacgcgctgggcgtggcgatcggcgccccggtactgacggcgttgaccgggcgtatgccgcgtaaacagctgctgctggcgttgatggtcctgtttacggcgggtaatgtgctggcctggcaggccccgggctatgaaacgctgatcctggcgcgactgctgaccggcctggcacacggcgtgttcttctctattggctcgacaattgctaccagcctggtggcaaaagagaaagcggcctcggccattgccattatgttcggcggcctgacggtcgcgctggtaaccggggtaccgttcgggactttcatcggccagcattttggctggcgggaaaccttcctcgcggtatcgattctgggcgtcattgcccttatcagcagcctgattctggtaccgaataatattccgggccgcgccagcgccagcctgcgcgatcagatgaaagtattaactcatcctcgcctgctgatgatctacaccattaccgcgctgggctacggcggcgtgtttaccgcctttaccttccttgcgccgatgatgcaggagctggccggtttcagtccgtcagcggtgagctggatcctgctgggctatggtgtctcggtggctataggtaacgtgtggggcggcaaactggccgataagcatggcgccgtctccgcgctgaagtttatcttcgccgcgctggtggtgctgctgctggtcttccagttgaccgccagcgttcactatgccgcgctggcaacggtactggtgatgggcatcttcgccttcggcaacgtgccgggtttgcaggtgtatgtggtgcaaaaagcagagcagtacacgcctggcgccgtcgacgtcgcttccggcctgaatattgccgcctttaacgtcggcattgctctggggtccatcgtcggcggacagacggtcgagcggtacggtctggcgcagacgccgtggattggcgcgatgattgtgctggtcgctttgctgttggtggtcctgagcggacgtttagataaattgccacgccgttcggcagcgctttctcccgaaggctaagggtttctcgcaatttgcattgaaagtgtatgggaaaatccctataacagaataaccagtcgtcgtcgggctggtttctgttatcgaggattaatgcccaaattgcgaaagaacacctacgccatgcgctatgtcgccggacaacctgcggagagaatattgcctccgggggcgtttgcgggcgtaagtccggtttatcccgccggcacgccgttaagcagcgatgagaagatccgcgtgctggtatggaatatcttcaagcagcagcgcgcagagtggcagtcggtcctcaaaaatttcggcaaagatgcgcatttggtcctgttgcaggaggcgcaaaccaccccagaactggtccggttcgcgacttcaaactatctggccgccgatcaggtgccggcgctggtattgccgcagcatccttccggcgtaatgacgctggcctccgcgcaccccatctattgctgtccgctgcgcgagcgcgagcctattttgcgattgccgaaatcggcgttagtgaccgtttatccgctgccggatgcgcggttgttgatggtagtcaatatccatgccgtcaactttagccttggcgtcgacgtctacagcaaacagctgctgccaattggcgatcagatcgcccatcacagcgggccggtgatcatggccggcgacttcaatgcctggagccggccgcggatgaatgcgctgtaccgctttgcgcgtgagatgtcgttacgcgaagttcgtttctcagacgatcagcgccgccgcgcgtttggtcgtcccctcgattttgtgttctaccgtgggttaagcgtgcacgatgcttccgtgctggtgacccgcgcctccgaccacaacccgctactagtcgaattcagtcccggcaagcctgattaatttaaggttggtcaggcctgccatggggcaggcctgcgcatgcatggtgctgccttttattactcaaaaaaaaccgtaaggacaagacaacatgacaacacgctctcaccatgacaacgtcgaaaagcagttcggctcccaggccagcgcctatctgaccagcgccgtacacgcctctggtcgcgatctgcagcggctggcggaacggctggctgattttcctcaggcgaaagtgctggatatgggctgcggggcagggcacgccagctttaccgcggcgggacaggttgccgaggtgaccgcctatgatttatcgagccagatgctggaggtcgttgccgccgcggcaaaggagaaaggttttagcaatatcgtgacccagcaggggtacgccgaaacgctgccgttcgctgatgccagctttgatgtggtgattagccgctactctgctcaccactggcatgacgttggccaggcgctgcgtgaggtgaaacgtgttctcaagccgggcggggtgattatcgtgatggacgtgatgtcgccgggtcatccggtacgtgatgtctggctgcagacggtggaagccctgcgcgacacctcgcatgtgcgtaattattccagcggcgagtggttgacgctggcgactgaagcggggctggtggttaaccagttgttgaccgatcgcctgccgctggagttcagttcatgggtggcgcggatgcgcactcctgagccgctggtggaggcgattcgcttatatcagcagagcgcttcggcggaggtcaaagcgtacttcgagttacaggaggacggatcgtttaccagcgataccattctgttcgaagcgcataaagcggtttaatttaggcaataaaaaaggcaccggggaagtcggtgcctttttgtcgaaccagaggtatcaggactctggtcgatcgctgtttttcacaaacaacgttagctgatcgccagggcgcaggttgtcggtatcgctgttccagcgcatcacgtcgcgaatattaacgccgtgacgtttggcgatgctcgacagcgaatcgcctttacgaacgcgataggtgatgctatcgctgttgttcgccagacgctgggcgctgctgcctgcgccaataaccagattctgcccaacctttaatccagagccgcgcaggttattccactgctgcagatcgcgggtcgtcacaccaagacgggaagctatcccggaaatggtgtcgccagaacgcaccttatagctacggctggtcagcggcgtattgtccgcgagctgcgtcggctgcacggcggcaatgtcgccagaggccagcgattcacgcagctgtgcggcgtgcttctgcggcaccatgacgtactttggcccgctcgcgcccagcgttgacccttttacgcccgcattgaacgtcttcagcttgctgaccggcataccggccatgtccgcgagctgagaaatatcaaccggactgtcgaggcgaacgcgcgccagcgcacggctttcatcagccgtaggcagctttacgccgtaacgtttgctgtttttgagaatgtcgctcaatgccagcattttcgggacgtagattttcgtttcatgcggcagagacagcgaccagaaatcggtgggtttgccacgcgaacggttcgcttttactgccttcatgacccggccttcgccgctgttataggctgcgaccgttaacaaccagtcgccgtcgaacattttgttcagacgttgcatcatgtccagcgccgcggtagtagacgcgacgacatcacgacgcgcatcgtaactgcgggtctgttttaaaccataattgcgccctgtgctcggaatgatctgccaaatgcctgcggcattggcgccagacgtcgcgtgtgggtcaaaagcgctctccactatgggtagtaataccagttccattggcatgttacgtttcttaacctgcccggctatccagtacatatacggctctgcccgtaaagttacatcgtggagatagctcttatttcttaagtacttctgtttctgttcgcgaatccggggattatccggtattcccatctttagctcgtcgcctatggaagtccacagatcctggtcttgcgcgtagaaggttccatcatctaaccagcgcgcttgacttgtgaacttgcctgcttccccttgaccagccgcagaaaggctctgtgctcgctgttcgacggtgccatcgtgcttagacgcctggcaccccaccagcaggacagaggcgagtaatatcgctcgtgccttcatgtgtgtgtcaatagttgcttaaaagacgaccaaggataacggcgaagttggccgatgacaagaattaaatatcagaagtcatctttctttgaccttaaccatgcaaatcgcgccacagagtgttgcaaatttgtttctttgttaattttgtcaattaaatcaatatcatttacgcgtaaaaataaatttatacgccgctcatttttcagagttacgggtagtgttttttgtttttttgcacgtaactcattaactttatgatagtaatcgtttatgtccctatcatctggcaggatactcaatgcaaacttcatattcgctaacgtatattcatgtgcgcaacatatgagggtttcttcaggaagggcattaattttcataaatgattgatacatctgctctgctgtaccttcgaacagccttccgcagccgccggaaaacatcgtatcgccacagaacagataaggttcgctgtagtaacagatatgtcctaatgtgtgacctggcgtagagaaaatggaaaaatcgtgcccgagaattgacagccgatcgccatcgcctaccacctgaatgacgcctttatcctgggtttccgccggcccgtaaaccactatagaagggaatttttcacgtaattgttttacgccgccgacgtgatcctgatgatgatgggtcaataaaatagcctcgggctgccactggttttccttgatggccgccagaaccggcgcggcttcgcctggatctacgatgatgcagcggccgttattctcactgagaacccagatgtagttgtcctgaaacgcgggaatactgataagattcataaattacctctaaagcgtagcggaaggtggcaatgaagccggcaaggatacctcacacagtgacagcgcctgagcattggtccagtatgccgtggggcgaatactatcgcgaaacgctggagcagcagataaaaccgtggctggctaaattatatggctttcatctgcttaagattggcaatctgagcgcggaaatcaataccgaagcttgcgccatctcgcaccaggtgaatgtctcgctggcgggaaatccaatgcaggtccgggctgacccgctgcatttaccctttgccgaaaagtccgttgacgcctgcctgctggcgcacaccctgccgtggtgtagcgatccgcatcgtctgctgcgggaagccgatcgtgtactgatcgatgatggctggatgatcctgaccgggtttaatccggtcagcctgatggggttgcgtaagctggtgccggtcctgcgcaaaggaacgccttataatagccgtatgtttacgctgatgcgccagctggactggctggcgctgctcaactttgaagtgctgcactatggacgttaccaggttttgccctggtcgcgccatggcggcaaattgttgagcacccatctgccggcgctgggctgtttgcaattgattgtcgcccgcaaacggaccattccgctgacgctcaatccgatgaaatccggcaaagcgaaaactcagctgcggccggcggtgggcgccacccggcagtggcgcaaagggcagaattaactctcaggcaggtagccgacatcgtccagtgtggggtgggaggccgccgcgcgcgccagctcgtcgcagcgttcattttcaggatggccggcatggccctttacccattcccatttaattttatgctggccaagcgcggcgtccagccgctgccagaggtcgacatttttcaccggctttttctctgccgttttccagccgcgctttttccagttgtggatccactgggtgatcccctgacgaacatactggctgtcagtgctgagcaccacttcgcaatgctcttttaacgcttccagggcaacaattgccgccatcagttccatgcggttattggtggtcagacggtagccagcgctgaaggttttttcgtgctggcggtagcgcatgatggcgccgtagccgccaggtcctggattacccaggcaagagccgtcggtgaaaatttctacctgtttgagcatctctggtagacttcctgtaattgaaatcgatttgtaaacgataagtctgacataaatgaccgctatgagcactgcaattacgcgccagattgttctcgataccgaaaccaccggtatgaaccagatcggggcacactacgaaggacacaagatcattgagatcggcgccgtggaggtgatcaaccgccgcctgaccggtaacaattttcacgtctatctgaagcccgatcggctggtggatcctgaagcattcggcgtacacgggatcgccgatgagttcctgctggataaacctacctttgccgacgtggctgatgagtttatggattacatccgcggcgcggagctggtgatccataacgcctcgttcgatatcggctttatggattatgaattcagtaagctaaaccgcggcatcggaaaaaccgagaccttttgtaaaatcaccgacagtttggcgctggcgcggaaaatgtttccaggcaagcgcaacagcctcgatgcgctatgttcgcgttacgaaatagacaacagcaagcgtacgctgcacggggcgttgctcgatgcccagatccttgccgatgtctatttgatgatgaccggcggccagacttcgatggcgttctctatggaaggcgaaagccagcagcaggcgggagagatgggaattcagcgcgtcgtccgcgccggcagtcagttacgcgtggtttatgcctcagatgaagaactggcgaaccatgaatcccgcctcgacctggtacaaaagaaaggcggaagctgcctgtggcgtgcctgatagccactaaaatgaattaaaaataggcggttgggtgatttttgcagcaaacgattcaaaatggtagaaaaagcgttgacggggtagaggggaatccgtaatattcgcctcgttcccaacggaacaacaacgcggagcggtagttcagtcggttagaatacctgcctgtcacgcagggggtcgcgggttcgagtcccgtccgttccgccactattcagaaagcctgagtcagcaatgattcaggctttcgtcgttttcgtcgccgaatttcagcgcacctcttgttcctcctgcatgcactgcataaatacccgcatcgccggactgatagccttcccggcatggtgggcgcagagcgcatggatcgtcaacggcgtctcgctgaatggcagctcaaccagcgtcccgcgcttgagctcgtcctccaccgcaaagcgtggcagaaaactcactcccagatttcccgccacgcactgcttgatactctcaatactccacagctcaatggtgttctccagagtaatttcgcgttggcgcagggtgctttcaaaaatctgccggaacacgcactggggttcgttgatgataaagctcagcgggatatgctgccgcgggcgcatgaagtctaccggcgcctgctcgaccgatgcgaccagcgtcagcgactgctggccaagctccattatcgtgagcgcgtcatcgttacccacccggtaaaacacccccaaatcgacctcgtcggcaagcagcgcatcggggatgctgtagcagttgagcgactgcagcgacaggcgcactttcggagcgcgttgcttaaaacgctgcagcacccgcggcattttatacgccagcagcgtttcgccagtggcgacgcgaagttcgccgccgggctcatcgtcctggcgtgccgcctgacgaatcgaggccatcactttagtcaggtcgtagacatgcggcaggaccttcttaccggcggcggtgagacacatccgccggccgattttctcaaacagcgggatggcaagctcctgctccagctgctggatatgaaaagtcacggtggactgagtgcagcatagtttctgcgctgcgcgcagaaaggaaccttcttcgacaacagttttgaaggtgatgaagcgtcgcagatccatatttcctctttgtatcgatactatcgaagcgagaatgaaaaaatattcatttttttaaattatcagcttcgggtagtgtctgccagacaagaggagaaaacccgtgacacctaccctgattagcgcctttttaacttacactttgatcaccgccctgacacccgggcccaacaatatcctggcgctgagcagcgtcacttcccatggtctacgccgcagcctgcgggtgctggccgggatgagcgtcgggtttattatcactatgttgatttgcgcggctttaaccttttcgctggttgaactcgactcacgctttaccctggtattgggatggattggcgcggcgtacatcctgtggctggcctggcagattgccaaaagcaaaccggcgacagggatgccgagtgtagaaccggtaggcttttgggcaagtctggggctgcagttcgtcaacgttaaaattattctgtatggcatcaccgcgctttctacctttgttctgcccgttactcgcgagcctgtttggcttatcagcgtgagtctgctgctggcggcgattggcgcgctgggaaatctgtgctgggcgctggcggggcatctgtttcagcgcctgtttttgctgtacgggcggcaactgaactggatgctggcagcgttattggtctactgtgctgtgcggatcgtggtggaataaaaagggagcgcagcggctcccgaagggtgattagccgatcgtgaaaggatcggcatcgcgccaggcggggaatttttcacgatattcctgaagggcgctcagcgacagctcggcatcaagacgagtggcctgatgcggatcggcggtggcgataatctccccctggggattgataatccgactatcgccgcggtaatgatggccgttgccgtcagtgccaacccggttacagccggcgacataggcctggttttcaatcgcgcgggcgatcagcagcgactgccagtgcagcgagcgcggcgccggccagttggcgacatacagcgccaaatcatagtcgttctgattacgcgaccataccggaaagcgcaggtcgtaacagaccagcggcaggatccgccatccacgccattcaaagaccacgcgctggtttccggcctcatagtgatgatgttcatcggccatacggaacaggtgccgtttatcataatggtgcaccgtaccgtcaggctcgaccagcaggaagcggttaacagcgccgtgttcagtttgcagcgcagcgctgccggcaatcagcgcctgggattgcgcggcccgggcatgcatccactccaccacgtcggcctcgggtaaagactgttttgccgcttccatggcaaagccggtggtaaacatctctggtaaaacaatcacatcgcgcccggtgattccttccagttggcgatcaaaatggcgcaggttggcagggccgtccatccagaccagcggttgttgcaacagcgaaattttcaggccaggcacaatggtcaactccattctcatgagggggttaggttaactgtaacaccatatcagccgcgcggcggtccgcggaatattttgttaaaaaaatgctactgatggaaacgaaaggggaggagagggcgaaaaaaaggcggggaaagttccccgcccggcgtgtgatgtggtagtggttttattatgcagcttcaactttacgaactttttccggcagctttaccggctttgtcgccagctcctctggcgcaaagtcgtcgacgttaatgctgcgcagacggctatgctctgcacgggtaagaatggcggcctcatcctgactgattaatcctttggccagcgcgttgtgggccagctcatccagacgggtgaacggcagatttttacccaactctttgcagatccgctggtggataggatcggccgccatcacttccagcagggcctcttccagcaggcctaccgggttatgctcgctcggcgtcagatactgaccgcggccgatgcgggagcgcgtggcgctgggcacctgcagaattttggcgacctggtggtccagcctatccgatggcgcatgatgatgacggccggtcgggaagatgaccaggcgcattacgcctgccaccagacggttcgggaaattgtccaacagatcgtcaatggcttgctcggcctggtgcagcgcgtcctgtaccccccagtgaaccagcggcagatcggcttcattgcgtccttcatcgtcatagcgtttcagcaccgccgaggccaggtacagctggcttaacacatcccccagacgggcggagatacgttcgcgtcgcttgaggctgccgccgagcaccgccattgagacgtctgacagcagtgccaggttggcgctcagacgattcatttgctgatagtagcgacgggtggcgtcacgagtcggcgcgctgctggtgcgcccgccggtcaggcccagccagaaactccgcactttattactgccgacatggccgatatgtttgaacagcagcttgtcataggcgttcaggtcattattctgcgcggcggccatctcctccagtacgtacggatggcagcgaatcgccccctgaccgaagatcatcatgctgcgggtcaaaatgtttgcgccttccacggtgatggcgataggcgcgccctgataggcccgggcgaggaagttgccttcgcccagcataatgcctttcccgccggtaatatccatcgcgtcgataatggagcgctggccgcggtgggtgcagtgatatttcacgatagcggacagcactgcaggtttctcgccgagcatgatgccgtaggtgatcagcgacgccgcagcgtccatcacataggcgttaccggcgatacgcgccagcgcctcttcaatcccttccattttgccgatggagattttgaactggcggcgaatatgggcgtaagcgccagtcgccatggcaacggatttcagaccaccggtggcgttggacggcagagtaataccgcggccgaccgatagacattcaaccaacatgcgccagccctgaccggccatgcttgggccgccgatgatgtaatcgataggcacgaagatatctttgccgcgggttggaccgttctggaacggcacattcagcgggaagtggcgacggccgatttccacgcccggggtggaggtggggatcagcgcgcaggtgatacccagctcttcttctccgcccagcaaacgatccgggtcagagagtttgaaagccagccccagcacggtggcgataggcgccagcgtgatataacgtttgttccaggtcaggcgcatccccagcacctgttgaccctgccagtcgcccatgcacaccacgccggtatccgggatggcgccggcatcagagcccgcttccgggctggtgagagcgaagcaagggatttccaggccgcgtgccagacgcggcagataatgattcttctgttcttcggtaccgtaatgctgcagcagttcgcccggacccagcgagttcgggacgccgacggtgatcgccaggatgccggagacgccagagagtttctgcagtactcgtgcctgagcgtaagcggagaactcaagtccgccatactctttcttaatgatcatcgcgaagaagcggtgctctttcagataggcccacagctccggcggcaaatcggccatttcgtgggtgatggcgaagtcgttagccatccggcaggcttcttcaactgggccgtcgaggaaagcttgctcttcggcggtcagccgcggctgcggatagttatgtaacttttgccagtcaggattgccgcgaaacagatcgccttcccaccaggtggtgccggcgtcgatggcttctttttccgtgcgcgacatcggcggcatcaccttgcggaatgtgcgaaacgccggtgcggaaatcatggatttacgcataggcgcaaagttaaacggcaacagtatgatcgccagcggcagcagcagccagatattccacactccggccgcgccgagcgccgcggtccaggcgagcaaaatcacgctgctgagcagcaggctgacccggtgatagaagagcgcgccgagtaaaacgacggttgcaacaatactcaaaatcatcatagagaaatgctccctgagcttgtaggaggtctgaccacttgtgatgtattggttgtagtgcatgcgtttttatttagcaatgtgtttacaaaataattacaaccttgctcacattgttgtatgcaaaagcggcacataaaatcaaaagagcgagggataacgctgcctgctgcttctcgcttcgacggctatccggtacactgccggggttattccactcatactgaaggattatcctcatgtaccaggatcttattcgtaacgaactgaacgaagccgcggaaacgctggctaactttctgcaggacgaagccaatatccatgctatccagcgtgccgctgtcctgctggcggatagctttaaggcgggtgggaaagtgctgtcctgcggtaacggcggttcccattgcgatgcgatgcattttgcggaagagctgaccggacgttatcgcgaaaaccgcccgggttacccggccatcgcgatctccgacgtcagccacctctcctgcgtgagcaatgattttggctatgagtatgtgttctcccgctacgttgaatccgttggccgcgcaggcgatgtgctgctcggtatctccacgtctggcaactccggcaacgtgattaaggccattgaggccgcgcgggcgcaggggatgaaagtgatcaccctgaccggtaaagacggcggtaaaatggccggtagcgctgatgtggaaattcgcgtgccgcactttggctacgccgaccgcatccaggagatccatatcaaagtgatccacattctgattatgctgatcgaaaaagagatggcgaaaggctaacaggcaggtgagtgtgtactgttgacggtggcctcgctccggcgccgtcgtgatttgtgagggtgaggtgatctatgtgcgaactgctcgggatgagcgccaatgtgccaaccgatatctgttttagctttaccgggctggtgcagcgcggcggcgggacggggccgcataaagacggctggggcatcaccttctatgaaggtaaaggctgtcgcacattcaaggatccccagccgagctttcagtcgccgatcgcgaaactggttcaggattaccccattaagtcctgttccgtcgtcgcccatattcgtcaggccaaccgcgggagggtggccctggagaacacccatcccttcacccgcgaactgtgggggcgcaactggacctatgcgcacaatgggcagctaaaaggctataagtcgctgaaaaccggtaattttcatccggtaggtgaaaccgacagtgaaaaagcgttttgctggctgctgcaccgtttaaccgagcgctatccgcgcacgccgggcaatatgctgggcgttttcaagtatatcgccaccctcgcgggtgaactacgtgagaaaggggtgttcaacatgctgctgtcggacgggcgctacgtaatggcgttctgctcgaccaatctgcactggatcacccggcgagcgccgttcggcgtggcaaaactgctggaccaggatgtggagatcgactttcaacgcgagaccacacccaacgatgtggtcacggttatcgccacgcagccgctgacggccaatgaaacctggcataagatcatgccaggcgagtgggcgttattttgtctcggggagcgtgtagtttgaggccagctgcggctggacaacctcgtggctgagcggcttgctcaccacatagcggccgtcggtcactgatacgaccggcggtttgtgggtctgctggaaatagtcatagcctggcttgagctgtttccagaaatccgcgtagtaggagtatttgtggcgttccatgttggcgttggtcatgcggaacggatagatactcacctgcacgcttggctggccgaagactaaggcgccggtcacgaactggaagatctcatcgataccgctgtcggtcatggcgtagcagccgactgagacgcagtcgccgtggatcatcaggtatttcccttcataaccatgggcgcgatcgtaggcgttcgggaagccgatgttaatcgctttatagaagcggctgtcgggtttgagctggctgcgggtgacgttatagaacccttccggactcttgaaatcgccctggcgctgtttcggaccgaggccaccggagtagttgcagatccggtagctgtcgaggagctggtaggtctcacccattttgacgtaaaggtcgagcatgcgctcttctttaaagatctcaatgtaaaccggtgaacccattaattgctgcttatattctttgcttaccggcgttgtcgggctgttgctgctgagcagcccggcaaatgacacgcacggcaacagaagcatcgcaataaataatgcgattttgcgcatactgcttgttccttgataaaacaaaatagccacattgccaggacggcaagagagacccgaaatcagagttttctggatttagagcgctcacattagcatcacggcattttttcgcaagggcgacgtggcggcgtttacaaatcagcctcactttataccctgccagcgacgaaaacacagtgagaactttgcgcaatagctcgcattttagaagcacttatcgccccttgcgctacagccgccgctcacgaaatgttacacttgcgccggttcatcatcagagtaagaaaggatgcttctcttccgtcctgagtgctactggcgccgtttcgccctttcttctctgccattctgtcaataagctggccctgacctgcgtcggggttgaggttacggatacctgctaacgatatgattaaaatcacgaaagggctggatttgcccatagctggcatgccattacagcagatttctcccgcgccagcggtgaagcgcgtcgcgctactcggcgaagagtacgttggcatgcgccccgcgatggcggttaaagaaggcgatcgggtcaaaaaaggtcagatcctgttcgaagataaaaagatccctggcgtctgctttaccgccccggcgagcgggatcgtcagcgcgatccaccgcggcgaacggcgcgtgttgcagtcggtggtgattgatatcgagggcaatgacgcggtggcgtttacccgttacgccgcggacgcgctggccgaactgccgcgcgacaccgtacagcagcagctgctggcgtcgggccaatggacggcgctgcgtacccgaccgttcagcaaaacgccgctcccggggagcacgcccgccgctatctttgttaacgccatggacaccaatccgctggcggcggagccgcagccgattattctggccgaacgtgccgccttcgacgccggtcttaccgtgctcacgcgcttgaccgacgggaaagtgcacgtctgccagcccagcggcggcaagctgggcggtcatcctctcggccaggtctgtttcaatcagttcagcgggccgcacccggcggggctgccgggaacgcatattcactttctggagccggtgagcctgaataagcaggtctggcacctcaattatcaggacgcgatcgccattggtaagcttttcctcgacggggagctctactgcgaacggataattgcgctcggcggcccgcaggtaacatctccgcggctggtcaaaacgacgctcggcgccagcctggaggatctgctggcaggtgagttgcaggagggggaaaacagggtcatttccggctcggtgcttagcggcgcccgcgcccatggccctcacgccttcctggggcgcttccatctgcaggtgagcgtggtcaaagaagggcgggaaaaagagctcttcggctgggtgatgccgggcaaagagaaattctcgattacccgcaccacgctgggccatttcttcaagcgcaagcgctttcatttttccaccgataccaacggcggcgagcgggcgatggtgccgatcggcaactacgagcgggtgatgcctctggatatcctgccgaccatactgctgcgcgatctgctggccggagacaccgacagcgctcaggcgctgggctgtctggagctggatgaagaagatctggcgctgtgcacctatgtttgccctggaaagtatgaatatggcccggcgctgcgcagcgtgttaacccggattgagcaggaaggataagagatgggcttaaagcacctgattgagaaacttgagccgcatttcacgcatggcggcaagctggaaaaatattacccgctgtatgaggcggcggcgaccatcttctacacgccgggccaggtaacccgcggcgcggcgcacgtgcgcgacgccatcgacctgaagcggatgatgatcctcgtgtggtttgccgtattcccggcgatgttctggggcatgtacaacgttgggctgcagaccattccggcgctgcacaagctatacggcgccgaacagctgcagcaggcgatcgccaacaactggcactacagcgtcgcccagtggttaggggtgagcttcagtgccgacgccggctggctgagcatgatgaccctgggcgcggtatttttcctgcctatctacctcaccgtctttatcgtcggcggtttctgggaggtgctgttcgcgattgtgcgcaagcatgagattaacgaaggttttttcgttacctctattctcttcgcgctgattgtgccgcccacgctgccgctgtggcaggcggcgctggggatctccttcggcgtggtgatcgccaaagagattttcggcggcaccgggcgcaacttcctcaacccggcgctggcggggcgcgcgttcctgttcttcgcctatccggcgcagatttccggcgacctcgtatggaccgcggcggacggtttctccggcgccacgccgctctcccagtgggccagcggcggcggtgaagcgctggtgaacgtggcgactggcgtgccggtgagctggatggacgccttcctcggcaatattcccggctcaataggcgaagtgtcaacgctgatgatcttcatcggcggggcgatcatcctctttggccgcgtcgcgtcctggcgcatcgtcgccggggtaatgatcggcatgatcgccaccgccaccctgtttaacgttatcggctccgacaccaacccgatgttcgctatgccatggtactggcatctggtgctcggcggtttcgccttcgggatgatgtttatggcgacggacccggtatccgcctcgtttaccgataaagggaaatggagttacggcgtgctgatcggcgtgatgtgcgtgctgatccgcgtggtgaacccggcttatccggaagggatgatgctggcgatcctcttcgccaacctcttcgcaccgctgttcgattatctggtggtgcaggccaatattaagcggaggaagtcgcgtggctgagaagaaaagtaacgatagcatcggcaaaacgctgctggtggtgctggtgctttgtctggtctgctccatcgtggtggcgggctcggccgtggggctgaaatcccgccagcaggcgcagcaggcgttggataagcagcgcaatatcctggcagtgtcagggctgatgcaccccggtatggatgcggatgcggtagcggacaccttcgcggcgcgcattaccccgcgactggtgaatctggccaccggcgaactgctggagaaagacccgggtaaatttaatcaggcccaggcgctgaaggatccgcagcagagtatggccctggatgccagtcaggatccggctggtataaagcgacgcagtaatctggcggaaatttacctggtgcgcgacgcgcagcagaagattgagcaggtggtgctgcccatttatggcaacggcctgtggtcgatgatgtatgcctttgtggcgctggacgtcgatggccgcacggtaaaaggcattacttactacgatcagggcgaaacgccggggctgggcggcgaggtggaaaaccccaactggcgccagcagtttgtcggcaagcaggtgctggatgacaacggtatgccggcgctgaaggtggtgaaaggcggcgcgcgcgcgggcgatctccacgcggttgacggtttatccggcgccacgctgacgtccaatggcgtgcagcatagctttgatttctggatgggcgaactgggctttggtccgttcctgaaaaaggttcgtgagggagagctgaataatggctgaacagagcgatatgaaagaggtgaagcgcgtgctggtggggccgctcatcgccaataaccccatcgccctgcaggtgctgggcgtctgctccgcactggcggtaaccaccaaactggaaaccgccttcgtgatgaccattgcggtgaccctggtgacggcgttctccagcatgtttatctcgatgatccgccaccatattcccaatagcgtgcgcatcatcgtgcagatggcgatcatcgcctcgctggtgatcgtggtggatcagctgctgcgggctttcgcctatgagacctccaaacagctgtcggtattcgtcgggcttatcatcaccaactgcatcgtgatgggccgcgccgaagcctacgccatgaagtcgccgccgctggcgagctttatggatggtattggcaacggtctcggctatggcgcgatcctgattatcgtcggcttcctgcgcgagcttatcggtagcggcaagctgttcggtatcacggtgctggaaacggtgcagaacggcggctggtatcagccgaacggcctgttcctgctggcgccgagcgcgttcttcattatcggtttgctgatctgggccctgcgtagctggaagcctgagcagcaggaaaaggagtaatcggtgatggctcattacatcagcctgtttgtccgcgcggtgttcgttgagaacatggcgctggccttcttcctcgggatgtgcacctttcttgcggtgtcgaaaaaggtctccaccgccttcggcctcggcgtcgcggtgacggtagtgctggggcttgccgtgccaatcaataacctggtctataacctggtgctgcgcgacagcgcgctggttgagggggtggatctcagctttcttaacttcatcacctttatcggagtgatcgccgcgctggtgcagatcctcgagatgatcctcgataagtattttccggcactgtacaacgcgctgggcatcttcctgccgctgattgcggttaactgtgcgattttcggcggcgtgtcgttcatggtgcagcgcgattacaacttcccggagtccatcgtctacggcttcggctccggcattggctggatgctggcgatcgtggcgatggcggggatccgcgaaaaaatgaagtacgccaacgtgcccgccggtttgcgcgggttagggatcacctttatcaccaccggactaatggcgctgggctttatgtccttctccggcgtgcagctataagggcgaataagtatggaaattattcttggcgtcgtgatgttcacgctgattgtgctggtgctgtcggggcttatcctggcagcgcgctcaaagctggtgaacgcgggcgacgtggttattgagatcaataacgaagcggataaacagatccgcaccccggcgggtgacaaactgctgaacacgctgtccagcaacgggatcttcgtctcctccgcctgcggcggcggcggctcctgcggccagtgtcgggtaactgttaaagagggcggcggggatatcctgccgaccgagctttcgcatattaccaagcgggatgccaaagccggttgccgtctggcctgtcaggtggcggtgaagcagaacatgaagattgaactgccggaagagattttcggcgtcaaaaaatgggagtgtgaagttatctctaacgataacaaagccactttcattaaagagctcaagctgcggatcccggagggggaggtggtgccgtttcgcgccgggggctatattcagattgaatgcccgccgcataaagtggcctatgcagattttgatgttcccgatgaataccgttcagactgggataagttcaacctgtttcgctatgtctctgaggtgaaagagccgaccctgcgcgcctactcaatggctaactatccggaagagaagggcatcattatgctcaacgtgcgcatcgcgacgccgccgccgaaggtcccggatgcgccgccggggatcatgtcatcctatatctggtcgctgaagccgggcgataaggtgacgatttccgggccgtttggcgagttctttgctaaagaaaccgacgccgagatggtgtttatcggcggcggcgccgggatggcgccgatgcgttcgcatattttcgaccagctcaagcgcctgcacagcacgcgcaaaatcagcttctggtacggcgcccgttcgctgcgcgaaatgttctacgatgaggagtttgaacagctggcgcgcgacaatccaaactttaccttccacgtcgcgctctccgatccgctgccggaagataactggaccgggcataccggctttatccataacgttctgtacgagaactatctacgcgatcacccggcgccggaagactgcgagttttacatgtgtgggccgccggtaatgaacgccgcggtaattaagatgctcaaagatctgggcgtcgaggacgagaatattctcctcgacgactttggaggctgacgatgctgacggtatttatcgcgacctttgtgatttttgcgctggtgatcctcggcatgtcgctgggctacctggtgaagcgcaagagcatccagggcagctgcggtgggatctccgcgctggggctggagaaagtctgcgattgtccggaaccgtgcgacgcgcgtaaaaagcgcctcgcccgcgaggcgcagcgtcagcagcggcgtattttgtaatgcccggcggcgctgcgcatgccggacctgctgcttcagttttgtaggccgggtaaggcgccagccgccacccggcataaagcggctccgtgcccggcggcgctgcgcatgccggggctgctgcttcggttttgtaggccgggtaaggcgccagccgccacccggcataaagcggctccgtgcccggcggcgctgcgctggccggggctgctgcttcggttttgtaggccgggtaaggcgccagccgccactcggcaacaacatgccagcaatgtgaggccgctttcgcggcctttttagccgttgactcccttactgccagcttttcgcctgcgccggagaatccaccatcaccccgtcggcgcccagttctatcgccgtgcggtagtcttccgcactgttgatgccgaagaagataatgtgcgctttatcctgcgagcggaagcaatccattgcctctttatcccaggtgagcgtcgccggggagatcccttcgccaagggtgaatttctccaccacctcgactttgcgcttcagctccaggccataccactgctcaccatcgcgttgactcgctggctggcactgatgactgagcgaaatattggcaagcctggtgcgggtttcactgcgagtgacaaagcgagggatggctggcggcagggcggcgatatagcggtcttcggtggaatagacccgcacgcgatcgaggctatcggtggtttttaacacttcaagcaggcgctggcccatcacggtgggatcggcatccggagatttgatatcgatatagaaaaaagtgtgcggccattgctgtaaaacgctttgcaaggtcggaatggtggcctgcttaccgcgccacgggtggctgtcatccccccatttccagccggcgtcgactttcgccagctcggcggcggtcaaactggaaactttgccctcgctattggtcaatgcggaaagatcgcttgaccggtagagcaccggtacgccgtcgcggcttaactgcaccgtgacccagatggcttcggcgttattctccagcgccagcttaatggccggcagggtattttccggcgcatcgccggtgccgccgcggtgggctatcagctgtggagcggcccaggcgccggcggtggccagcaggcaaagcgcggtaagtattttcttcatgattacatcttcctgatttatcttttaactcaatgaaaataaacataatttattgcagttttatgttttaaccgcttttttagccaatgaaataaaaaaagcataaaattcgcatctgattttgctatgctgtatgggtatacagtgttgagtctgacgatgcgtaaaattatccatgtcgatatggactgtttctttgcggcggtggagatgcgcgacaacccagcgttgcgcgatattcccctcgcgataggcggcagtcgggtacaacgtggcgtgattagtaccgcgaactatcctgcgcgtaagtttggcgtgcgcagcgccatgccgacggcgacggcgctcaagctgtgcccgcacctcacgctgcttcctggccgctttgatgcctacaaagaagcctcgaaccatatccgcgaaattttctcccgctatacctcgcgcattgagccgctgtcgctggatgaagcctatcttgacgtcagcgacagcgagcattgtcacgggtcagccaccctgatagcccaggagatccgccagaccatcgaacgggagctgcgcctcaccgcctcggcgggggtggcgccggtgaagtttctcgctaaaatcgcttcagatatgaataaacccaacggccagttcgttatcgctccccatcaggtggcagagtttgtgcgggcgctgccgctggcgaaaatacccggcgtcgggaaggtatcggcagcgaagctggaaaatatgggcctgcgaacctgtggcgatgtgcagaacagcgatctggccatgctgcttaagcgcttcggtaaattcgggcgtattctgtgggagcgcagccacgggattgatgagcgggaaattcataacgatcggcagcgtaaatcggtgggcgtggagcgcaccttagcggaagatatacatgaatggccggagtgcgaagcgattatcgaaaacctctatcccgagctggagaggcgactggcgaaggtcaaacctgatctgctgatcgcccgccagggcattaaactgaaattcaatgatttccagctgaccacccaggagcacgtctggccgcggctgaacaaagaggatctgatcgccaccgcgcacaaagcctgggatgagcgccgcggcggacggggcgtgcgcctggttgggctccacgtgacgttgctcgatccgcagctggaaaggcagcttttattagggatttagccatgcatattcgtgcttaccgcgacagcgatttgccactgctctgccagatctttctgcgcgcggtgcgggaaaccgccagtcgggactataccccggggcagatcgcggcctgggcgcaggtggatgagacgcgctggcgacaaaagctggccgactcaatcggcctggtggccgtggtcaacagccagccggttggctttatcaccgccatcgggacgcatatcgatttgctgttcgtctcgccggatcgtgcccgccagggtatcggcggcgcgcttatcgaggcgctctgcgttcagtatccagcgcaaatcctgacggtggacgccagcattaccgcaaagccctgttttacggctcatggttttaaggtggtggctgagcaacgggtggcggcgcgcggggagtggtttattaattaccggatggaaaaacgcgtggcgctaaggtgatgcggggtaaaaccggcggcgggccgccgccggttgtggggcttatttagccggaatggctttcagcagctcggtcagcagcgtccagtattgaccgacgctctcgatatggacctgctcatccggggagtgcggaccggtaatggttggcccgatggagaccatgtccatctccggatacggttttttgaacagaccgcattccagaccggcgtgaatgatctggatgttcggcgtcttgttgaacagacgctggtaagtctcgcgtaccaggtgcatcaccggcgaattggcgtccggttgccagccagggtaagcgcctttggcttcggttttcgcccccgccagcttacccagagaatccagcatgctgaccacgtagtctttgccgctgtcgatcagcgagcggatcaggcagtggatctgtacgttgtcatcggtcatggtgacgacgccgacgttcagcgaagtttccactacgcctttcgccacgtcagagttgcggataaccccgttcggcgtggcgttcagcagacggatgaaagtgtcgcgggaagcctgagtcagcgccgctttgtcgttatcgaccgcttccacgagcaccaccaggttcttctctttggcctccagctcgtttttcagcagcgcctggtaagtattcaccagcgctttcagcgcatcggctttatccgcggcgacggcgacagtagcgtaagcttcacgcgggatggcgttgcgcaacgtgccgccgttgaaatcgaccagacgcagatccagctcatcggcgtggccggcgaggaagcgcgacagcagcttgttggcattacccagaccaaggtggatatcaccgccggagtggccgcctttcagcccttttaaggtgactttaaagctctggaacccggcgggaatcgcttcgcgggtcagcgccaggttagaggtgaaatcgatcccgccggcgcaacccatatagatttcgccttcttcttcggagtcggtgttgatcaggatatcggcctgtagccagttggcctgcagaccgaacgcgccgtccataccggcttcttcggtcatggtcagcagcacttccagcgggccgtgagcgacgctatcatcggccagtaccgccagtgcggacgccattccgataccgttgtccgcgcccagcgtggtgccgcgcgctttcacccattcgccgtcaatgtacggctggatcggatctttaacgaagtcgtggacggtgtcgttatttttctgcggcaccatatcgaggtgcgcctgcagcgctaccggcttacggttttccataccggcagtcgcgcctttacgaatcagaatgttgccaacctggtcgcgttccgcatgtaagcctttttcttttgcccaacccataatatgctcggcgagctgttcttcgtgataggacgggtgcgggatggagcaaatcttggcaaaaatatcccaaagcggctgcggggatagttgagacagttcagacacggtaagtctccttacagactcctgcatacagcggttgcaggacgagggttagcgttaaaatacacaacaagcccgggcttgcgcgatggggttgagaataccactttccaccgccgcaggtagtgtaaacaacgcaaaaagcgttgcgcaaaccgcttaacactggtttttagtgcgtcagatctctataatctcgcgcaaccattttccccctagaacattatttaagccgtattacacaggctgggacacttcacatgagcgaaaaatacgtcgtcacctgggacatgttgcagattcacgcccgcaaactggccagccgtctgctgccggttgagcaatggaaaggcattattgccgttagccgcggcggactggtaccgggagccttactggcgcgtgaactgggcattcgtcatgttgataccgtatgcatctccagctacgaccatgataaccagcgcgagctgaaagtgctgaaacgtgcggaaggcgatggcgaaggctttatcgtcatcgacgatctggtggataccggcggtaccgccgtggcgatccgcgaaatgtatcccaaagcgcactttgtcaccattttcgccaagccggcaggccgcccgctggtggacgattacgttgtggatattccgcaggatacctggattgaacagccgtgggatatgggcgtggtgtttgtaccgcctatcgcaggtcgttaattcttcaggacagtgctatttaccacgcccggcttgccgggcgtggttttttttatcctttagcaggttacaatatccggagtggcactacgacggagactgcacatgtcacaggctaacctcagcgaaacgctgtttaaacctcgcttcaaacatcccgaaacttctacgctggtgcgtcggttttctgccggaaaaccccaggcgatgcagtcggcgctgagcggcaatcacgtcgatcactggtaccgtctgatcaaccgtttgatgtggatctggcgcggcgtaactccgcaggagatcctcgatgtgcaagcgcgcattgtgatgagcgaggccgaacgaaccgatcctgagctgttcgataccgtcatcggctatcgcggcggcaactggatcttcgagtgggcgaaagaagccatgcagtggcagcaaaaggccgggcaggaagccgatcctttgctgagcggccgccactggctgcatgcctcgaacctgtatagcattgccgcttatccgcatattaaaggcgatgagctggcggaacaggcgcaggctttagccaaccgggcgtatgaagaagccgcccagcggctgccgggctcgctgcgcgagctggagttcaccatccctggcggctcgccgataaccgggtttttgcatatgccgaaaggcgaggggccgtttccgacggtgctgatgtgcggggggctggactcgctgcagaccgattattacaacctgtatgagaactacttctcaccgctcggcattgccatgctgaccattgatatgccctccatcggcttctcgtcaaaatggacgctaaatcaggacaccagcctgctgcatcagcacgcgctgcgccatctggaaaatgtgccgtggattgaccatacccgggtcgccgctttcggcttccgctttggcgccaatatcgcggtgcgtctgggctatctggagccgcagcggctgaaggctgtagcctgtctgggcccggtcgttcatggtctgctggtggatcccctgcatcaggggcgcgtgccggagatgtatcttgacgtgctggcttcgcggctgggcatgcatgacgcctccgatgaagcgctacgcgtggagctcaaccgctattcgttaaaaacccagggactgctggggcgccgttgcccgacgccgatgctctccggcttctggaaggacgatccgttcagccccgaagaggagtcgcggttaatcacctcgtcatctgccgatggcaaactgctggagatcccgtttaacccggtgtatcgcaattttgatcacgcattgcgacagatcgcccgctggatcaatcatagatttggttaatttattgctaaattctattggtttggtaaaacagttgcatcactaaaggagatcgcaatgacgttaccgagtggacacctgaaaagtaagttgatcaagaaattcacggcgctggggccttacattcgcgaagagcagtgccatgacaaccgtttctttttcgattgcctggcagtttgcgtcaatgttaagcccgcaccggagaagcgtgaattctggggctggtggatggaaatggaagcacaggagtcacgtttcacctatagctaccagtttggcctgttcaataaggaaggatcatggcaggcggtcgacattgacgacccggaagtgagcgacaggctggaaaaaacgctgcgcgagtttcacgagcgcgcagcagcgctgctgaccacctttaatctgaagctggaaccggccgacgatttcagcgagccggttcgcctgcgagcctgattgatctacggatacgatttctccacgcccgtgcggcgtggagatgcgtgccgccatacccgtaatttccacccctccatctgactcaccctgcctgcggcgacagcttgccagccatcgcctgttgaataatcgggatcggagtcagtaagtgctcacgcatcagcgcgctggcctgttcggcgtcgcgcgccagaatagcgtccaccagggtctgatgctggacatgcttatcttccagcatctccaccgacagcacggtggtgcgcagccagatgaagcggtagcgcgccgccagatcgaacagccgttcgcgcatctgcagcagatactgcgaaccgcagccggcgacgatggcggtgtgaaacgcctgatggcgctggtcccattcatcgagtaggtgctcactcgcttcgcacgactccagcttgttgagcagatgggcgcgggccagcagctcggcttcccactcgtcgccgccgcgttcaatggcgagacgcaccagcatggcctccatgttggcgcgcgcgtcgaagatatcgagaagctcctgttccgacatgggcgccacccgatagcctttctgattgaccaccgttaccagccgctcggccaccagttgcgaaagcgcctcgcgcagcggaccgacccccaggccatagcgcgacgtcagcaggctcatccgcagcttctcatcggggtggtaaaccccgcagatgatgtcgttttttaaccaacggtacccgtcaatggccgtcgcctggggaatggcggtcatgttcttactcctgaatactcttcccggcgggcgccgggaacagggttaacgcgtattttgcagcggcagtttttgccacaataccagctttttccagcgtgacataatcggtaccgtacaaataattcccagagctaacaggccggtagagatcacctccagctgctgtgccggacggaacagcatcaccaccagcacgaaggtgataaaggcgatcaccagccaggtcaggtacggatagagccacattctcagacggatttcgccgccttgcgcctgaaggattttgcgcatccgcagttgtgaaacggcaatcaccagatagaccagcagggcgatggcgccggagctgtcgatgagaaatttaaacaccttggcgggggcatagtagttcaccactacggtgaggaacgccgcgccggtagagagcagcaccgccacgtatggcgttttgctgcggttggtccggcccataatggccggcgcatcgccgcgacggctcagggagtagagcatccgcgaggcggtatacagcgccgagttcagacagctggtgaccgacaggaggatcacgccgtccataatcagcttggcatagggaatatgcagcagctcgagcaccgagcggtaggagccgatgctcttcagccccggcatattccatgggatgagggcgacgacgataaagatcgagcacagataaaaaatagagatacgccagatcaccgagttggtggcgcgcacgatatgtttatccggggtatccgattcggcggcggcaatggtgacgatctccgcgcccataaacgagaacatggtgatcagcatcgcgctcagcaccgcgccgaagccgttaggcataaagccgccgtgatcccacagacgcgaaatgccgctcacttcggcatagggataaaagccggtaatggcgaccgcgcccagtacgataaacgccagaatagcgatcactttgcacagcgccagccagaactcgaattcgccgtagttcttgacgctcagcaggttactgccggtgagggcgagagtgatgaccagggagaacaaccacaccgggacgcccggcacccacgaatgcagaataatcgccgcgatattggcttccagcggaataaccaggacccagaaccaccagtacagccagccgatggtataccccgcccagcggccgatggctttatcggcgtaggtggaaaaggagccggtatccggcgtggcgaccgccatttcggccagcatacgcataatcatcaccaccagcagcccggcaaacagataggccagcagcaccgccgggcctgcctcggcaatggcgacgctggatccgactaataaactcgcgccgatcaccccggcgatagataacatcgtgacgtggcgcgacttcagccccgcccctaaatcctgtgattgcgacagttgccccatcatttaccctctcgaagtgtgtcacctgggagagcgccccgacgttcccgcgccggggcacgcgtattattgttgttttgcaggtctcgtcttcattcccttacgaacgtacttcgcttccgcatgtgttctgttctatgcctgtttcgcctcgctaaagcagtcggcgatgatcttgagcccctgctcgatctgcgcctcttcgatggtcagcggcaccaggatgcgcagcacgttgtagtacggcccgcaggagagcaggatcaggcctttgtcgcgggcgcgggcgacgatatccgccgtcagcctggcgttcggcctgctgcggtcgccctcttcaaacagctcaatggcgatcatcgcccccagaccgcgcacgtcgccgatctccggatgatcttcagcgatcgccagcaggccctggcgcagggtgtcgccgagctggttggctttttccagcagattctcctgctcgaaaatctgtaataccgccagggcggcggcgcaggcgatggggttgccggcgtaggtgccgcccagtccgccgggggcgatggcgtccatcacctccgcgcggccggtgacgcccgccagcgggaaaccgccggcgatggatttggcgaaggtggtgatatccgccgcgacgcccatctgctccatggcgaacagggtaccggtgcggcccgcgccgctctggacctcatcggcgatgagcataatgccgtgctcgtcgcacagggcgcgcaggcgctgcataaaggccggggaggcggcatagaacccgccttcaccctgcaccggctcaataatgatggcggcgatatcttccggcgcggcatcgtttttgaagatgcgatggatgctggcgatcgcctcgtcatcactgacgccgtgcagcgcgcatgggtagagggcgcgatagacatggcccggcattaagcccataccggcggagtaaggattcactttgccggtcagcgacagggtgtaatgggtgcggccgtgataggcgccggtgaaggcgatagcgccgctgcgcccggttgccgcgcgggcgatcttcaccgcgttctccaccgcttccgacccggtggtgaccagcagggttttcttggcgaaatcaccgggcaccttttgattcatcttttcgcacagcgccagataaggctcataggccagcacctggaagcaggtatgcgacagctttttcagctggtcttcgacggcggcgacaacctgcggatgcaggtggccggtattgagcaccgcgataccgccggcaaaatcgagatattcccggccttccacgtcccacacccggcagttctccgcgcgttcggcgaagatagggtggatctggccgacgccgcgcgggaccgcgtcgctgcgacgcgccatcattgctttattgctgttcatccgtcgctcctgttaaaggccaatgcacatatatttgatttctaagtaatcttcgatgccgtacttcgacccttcgcggccgaggccggaggccttaacgccgccgaacggcgcgacttcggtggagataatgccggtattgatgccgatgatgccgtactccagcgcttcgccgacgcggaagacgcggctcagatcgcgggcgtagaaataggcggcgagaccgaactcggtatcgttggcctgggcaatgacgtcggcttcatctttaaagcggaacagcggggccagcgggccgaaggtctcctctttcgccactttggcgctgtcgggaacgttgaccaggatggtcggctggaagaagttgccacccagggcgtgcggtttgccgccggtgaccaccttcgcgcctttggcgatggcatcggcaatgtgttcttcaactttggccacggctttctcgtcgatcagcgggccggtggtgacgccgtcctgcaggccgtcgccaatgcgcagtttttccaccgcctgctgcagcttctcggcgaaacggtcatacaccccgtcctggacgtacaggcggttggcgcagacgcaggtctgcccggcgttgcggaacttcgacgccagcgccccctcgacggctttatcgaggtcggcatcgtcaaagacgataaacggcgcgttgccgcccagctccagggagacttttttgatgtctttcgcgcactgctccatcagctggcggccaatctcggtagagccggtaaaggagagcttgcgcaccagcgggttgctggtcagttcgccgccgaccgcgccggcggagccggtgaccacgttgaacactccggcggggatcccggcgcgattcgccagttcggccagcgccagcgcggaaaacggcgtctggctggccggtttcaggaccatggtgcagccggcggccagcgccgggcccgctttgcgggtgatcatcgccgccgggaagttccacggcgtgatggcggcggtaacgccgatgggctgcttaatcaccagcaggcgcttgtcggcctggtggccgggaatggtgtcgccgtagatgcgcttaccttcttcggcgaaccactcaataaaggaggcggcgtagctgatttcgcctttggcttccgccaacggttttccctgctcgagggtcatcaggcgagcgagatcgtcctgattctccatcataagatcgaaccagcggcgcagaatgttcgcccgctctttggcggtcagggcgcgccaggcgggtagggcgcgattggcggcttcaatcgcttcgcgggtttcatcggcgcccattttcggcacgctgccgagctgctcgccgttggccgggttggtgaccgcaatcacgtcgccgttgggcgcatcgcgccactggccatcgatcagcgcctgctggcgaaacagtgtcatatcgttgagttgcataattgcttcctgtcttcagggggggttaacgggtaaaagcggcgtgtagtgtctccacgctacgtgccgcacgcagcgtgcgtccgggattgctctggctggccagcaggctctgcaccttgctgacgatatgcgcgccgatcgggatagcggaggtggccgctggcgatggcgcattgcaggtatgtatcgaacgcgcggtggtaacgaagagaaaatcgtcgatcagcttgccctgcggcgacacggcctgcgcccgcacgccggccggccacgggcgtaaatcgctcagcgtcaggctcgggcagtatttttgcaccagccgcagatagccgcttctgcacagcgaattcttcatttcgcccagtccggagcgcaggttgttttgcagtacccggcggatgccgggcgaggtgaggatctccagggtatcggccagcgagatatcgcgcttgcggtagccttcgcgcttcagagccagcacggcgttggggccgacggtgacgctgccgtcgatcatgcgggtcaggtggacgccgaggaacggcatcgccggatcggggatcggatagatcaaatggttgacgatctggttgtgctgcggtgccagctggaaatactcgccgcggaacggacaaatgataaatccggggtcgacgccgagcatttttaccagccgatcggccatcaagcccgaacaggcgatcagcgtcgaggcctcatattctccgccctggcgggtgcggatcaccacgccgctggcatgttctttcagggcgctgacttcggcgttgtagacgatcgttccgcctttcgcttcgaagttcttcgccattgccgccgccacttcgcggtagctgacgatgccactggaagggacgaagatcccgccgagcccggtaatgttcggttcgcgctcgcgtagctccccggcgcttagccactcgcgctgcaggccattggcggcggtgcgatcccacagggcgcgcatccgctccatctccagcggtgaggtggcgaccagcattttgccgcagacgtcatagcggatgccgttctgctcgcaaaaggccttggtggcgcggttgccggcgaggcaaaactgcgccttgaggctgccgggcgtgtaatacaccccggcgtggatcacgccgctgttgtggccagtctgatggcaggccgggccggcctctttttccagcagcgcaatgcgggcgtccgggtaaatctcaattaactgcatggcggtcgacatgccgatgatgccgccgccgataatcacgaaatcatacatccactcaattccttcgcctgaaaacccttattgatgagtctggtaatgattcgtggaatacgcaaagtagccgcgctggcgcatcagctcgcggcgcaggtccgggtgcggcgtaaagcggtcgcggccgtgcagccagaacaggttgttaatgagcagaaatttgcccaccggcaccggtatggaaaggatgtttttgctggtctccagcgcgtcggagaggcggctcagccaggtgccttcttcgaaatctttcggctggacgaactggtcgatatagcgcattaccgggcggcccagcgaatcgacgtcgaacaccgggtggaaaacatccttgctgacgtttttgctcggcggcgcggcccagcgcattgggcggcgagccagcgggtcgcggaaaaattcgtcgagatgctcccagtcgtcgagatgcagcagcagggaattgccgccctgcatgttctgctcgtcgatcttcatcattaatacgtagtcggtttgctcttcgacgtaggtgccgtcgttgtgcagctccatcacccggtgcggttggcgcaggtagctgtctgagttatcgacatttttcaccacgaagcgggcgtaatactgaccgctcatggcgtcgaagttggaacgaccaatcaggtgggcgacggcggtggccagcttgaccatctcctcggcctggctgacgtgatcgatcccttcgccgttgataagcagcgcgccttccgcgcgatcgagcaatgttttgatcagcaacggctgcagctgattgccacacagatcgtcgaggatcttgccgacctggaagcgtaagaaagatttgtactccagcgcctgcaccggccactgcgcgacctgctgcaggaattgcgtggtcgtttcggcggaaaaggtgagctccagcaggcgcggcgactgggcggaaggggtgaaagaaaagccagggtattgctgggctaccggcgcgggtgtcggttttactgcggtcagggcgttcatcaggatcgttcctcgctgtaaggtcagggtgatgttcatttcgtagccataaattaaaaatatctacatttttataaaatgcgtacgaaatggcctttttgtttccattttgtgatctgacaacaattatttaacaatacgggaggggggataaggtggtggtgaaagttgcggaacagagcgggtggcggatagcgcaaaatggggatagggccgagggaaatcgtaataccggtcacagtttttaatctgcacaatatccttaccagatgaaggtgttaatattcagctggtaaatacctttcaatgctcactgaggcttcgatgctggagaatgtcattatcagataatcagtttcccgacctgcccaggccggactgattatcgctgcgcttaaaccttacgcacacacctgcgggtgtaggcatgttttcgcacatgataatgaacaggtttcagtatgaatttatcccgtcaggaacaacggaccttacacgttctcgccaaaggtggccgtattgcgcacgtccgcgatacctccggccgcattaccgccgttgaatgttacacccgcgaagggctgttgctgagcgactgcacccttgcggtcttcaaaaagctcaaaaccaaaaagctgattaagtcggtgaacggccagccgtaccggatcaacacgaccggtttgaataacgttcgcgcgcaagcggacaaccgctgaaatagcgacccgggcagggtcgctgcccgggcgtatggctctcaaggagaaaacctcatgatcgatatccctcgcatttttaccatcagtgaaagcgagcaccgtatccataacccttttaccccggaaaagtacgccacgctgggacgggcgctgcgaatggcgccgggcaccaccattctcgacctcggcagcggctccggcgagatgctctgtagctgggcgcgcgatcatcagatcgtcggcaccggcgtagacatgagcctgctgttcagtcagcaggcggccgcccgggcagaggagctcggggtaagcgaccgggtaacctttgtgcaccaggatgccagcggatatgtcgccagccagccgtgcgatgttgccgcctgcgtgggggccacgtggatcggcggcggggtggcaggcacaatcgagctgctgaagcagagccttaccccaggcggcatgttgcttatcggcgagccatggtggcgcaaacgtccggccacggcagaagaggcgattgcctgcggcgcgcagtcacccgatgacttcctgacgctaccggcgctggtcgcccactttggcgaactgggctatgacgtggtggagatggtgctggccgaccaggagggctgggatcgttatgaagcggcgaaatggctgacaatgcgccgctggctggaggccaatccgcacgatgacttcgcaccggaggttcgccagcagttgaccactgcgccgctacaccacgtcacctggacccgggaatatctcggctggggcgtgtttgtcctgatggcgcgttaaccggtatgtcggtagcgtcaggaggcgctaccgaccaccttcagaccttcagttcgtcgtagctgaccatgacgtgctggcgaaaggcgggccgtgaggttagccgtgcataatacgccgcaaggtgggggaggggacgacgggggatatcgattgcaaagtagcggtacagcacatgaccaaactggatatcggccagggtgaacgtatcgcccaccagatagcgactcccggcgagacgtgcctcggcaatcgccagcttttgctccagggccgtcaccgccgcggcgatggcctgcggatcccgctcggcggcaggcgtgcgcaccacgcgccagaacaccggcgtcgtaaagccgagggcgatattctgctttgaccactcggcccagcgatcaacctcagtacgagccagcagttcgcccggccagaaggcgtcgtcggcgtagcgactggctaaatagcgaaggatcgcgccggtttcccacagcggcggattttcgtcatcctgcagcactggtaccgtacgattgggattgagctgataaaacgcctcgctgtcggtaccgccatagcgatgccccacgtcgaaccggagatagtccaacccaagctcgccaacacaccacatcagcgcctgcacgttagaggaggtttttcggccccagatggtcagcatcgggatctccagagaacagggaaagaaggagcatagcaggttgggttgaaaacgggagggggtacaaaagaaatgagccacctcgccgcgcagggggcggacgcgctggtcagatgttcaaaccaggggcgtagctgagccagctattcagtgcacagtataagaggaagaagcagagggcagcagtttgccctctgtttacttgagtggtcttgtactaatgtgtggcgctaaaaaactcgccaaatttgacggccagccagccgacaggcgtcgtggcgccgccgacgatattggtgatctcggccatcccttccggcaccggaatatgcgagttcaccgccgcctgagtgtattcttgcgaaatgtccgtcccgacatacaggatgcaggtcacgatcagggttccggttatgaacatgcggaacatatttcgtttacagaacggcgtgaccattgccagcaggaacattaaggaagccagatcgacaaagggcagtacgcggttgccgggcagaatgatagacagcaccacagccatagggattaacagcagaccggtcgccagtaccgaaggttcaccgatcagtaacgccgtatccatcccgatgtaaaaatcgcgccccgggaatttagccttcagttttgcttcagcggcatcacggacaatcaacaatccctgcaccagaatttcaatcattttaggcagcagcagcatggcggctgaaaccttaatggccagtgaaacggccgcggaaacgtcatatcccgccaggaaggccaacagcagtcccagtacgaaccccagagtaagaggctcgccaaaaacgccgaattttttattaatactttccggatcgaaattgattttattgataagcggggtcttttcaatgatgtaattacaggcaatgccaaacggcacgtaagctatacaggtaagatgggggaatgatatccctttaagattatagtttttttgtaaatacggcgccgttaaatctgccgccaatagcgtcaacacaaaaatagcgaatgtaataccgaccgaaagccagtaatttcccgttccggcatagaccacagaccccatgatcaggaaaatccagtagttaaaaatatcgatattcaccgttttggttaatttcaacagaagcatggccaggttgatgacgataaagcccaccacgacgggcagcatcagcggcgaaccccagccaatggtcgatgcggtaggccaaccggtatcaacgaccgttaactgcaggccgatacgctcaaccatcgcctgcgatgccgggcccaggtttgtcagcagcaggccaatcaccagccccaccccttcaaaaccaatgcctaccagcatccctgctttaaatgccgtaccgattttaacgccaaagcaaagcgcgataataaagaatattactggcatcattactgatgcccccagactaataatgctgttgataatatccataatgattccttaaaaggcgggcgaattgggcacgagtaaacccgtgcccattgggccctgttaatacctttaatggttcttttaatatttaactgagtttctttaaaaggatctcagcgaagagtttgggcgaattactgaatgcgtcaatggtactcccggcaatatgcggcgtaatggtcacgttattcagagtatagaatgcactgtcgtctggaagcggctcgtcatcaaaggtatcaagcgcggcgcccatgatttgcccggatctgagcgcatcaatcatctctttttcattgattaacccggagcgtgccgtgttaacaatgatggcactgcgcttcataagcgcgaaatggtgtgcgttaatcagattttcggtttccggcgtcaggcgagcatgtaacgagataacgtcggcgcgttgtaccagttcgtccagagaatcgactttctcataacgttcatggcctgcaacgtacttatcgtaaaagataatctccgtgccaaagccgctgagaaatcccgcgaccagttgggcaatatgaccgaggccaaccagccccacgacttttccgccaagctccgggatcgcctgatggttcggactgtctttacgccagtatttgtcacgcagggcatcgtgtgaacgggcgatattgcgcatttccgccaggatcatgccgaccgtgaattcggcgacgctgcgagcgttacgccccggggtgttcatcacctcaacgccccgggcgttcgccacctgaagattcacgttttccacgccaccgcggagcacgcctacatatttcagctttggtagtttatcgaacaccgcagtattgaccggggcaaactgagtgatcaggatgtcaatatcatccgttccctgaagcagcgcttccggtaaggccacggcttctgctccttcctgttcaacccgcagattatcttcctgaagtttctcaacggagtcatgtgaccactcgcgtacttctacttcaatcccgttatccctgagcgctttcagtcctgattccatcatcgctgcattgataaacagatcggcaattgccagacatttcataatgattctccctagattaacgcatcaacataccgccggtaacgtccagagttgctcccgtcatatagctggtcttaggagaaaccatgaagacaccgatgtcggcaatttcttgcggctgggccacgcggcccaccggaatacgactgacgtaagagtcagggttttgctcaatgttcttacggatcatcgcagtatccatgatcccgacggcgatattgttcacattgattttttgtttggcgacttcccgcgccagtgagatagcaaaggcgaccaggccggccttacttgccgcgtagtgcgcatgtcctgtcgtggagccgtggaacgcagcctgcgaggtaatattcagaatgctgcccatctggtcatgctgcaggcagtgatttacaaacagctggctgagatggaagatggctttcagattgacattcatcaccagatcccagtcctgcgggctgatctcggtgacgtagccgctcagccagatcccggcgttattcaccagaatgtcggctttgcccagtctgtcgatacaggtggcaaacagattttcccggctctgctcgtcagagagatcggttttgaccgcgatgatctctacgttcgcgctggtcttcaccgtttcgatcagccgttcgggatgctcttcctcacgcatataggtaaagcagatattgacgccttctttggcgagagaaagaacaaactctctccccaggccggttgcgccgcctgtcacgatggccgtacgattcgttaaattcagatccattttttcctcacttagtgcgcgatgtagttactgcagcttttccacggcgactgcatttctgataacaggtttttataaagctggtatttggtctggtagacccggtggttttccggattaggggagacggtgcgtgagacatggaccatatcgtttgaggcagcaaatacctccgcaaaccagcccaccataacggcggcggtcatcgcggtacccaaggtcccgtgctctttgacgtcaacgatttccagcgtggcctggaagatatcggcgaatatctgcagccagaccggggagttcgtgacgccgccagcaatacgaatagtgtggcttagcttcgggttaatattgcgtaagcgctcggtgtggtagagatggctgaaggccacgccctcataaatcgcccgcagaaaatgggcttttttatggaagctgttgacaccgataaagccggccgaggcatcgggaatggtgttagagccaaacacgaacggaaagaacagcaggtggctttcatccggcgtcgttgatgaaaccagcttattacacaggtcatagaccgacgatccttgttcggcggaggttttccgatcgctctccataaagttgttaataaaccactccaggttgctcgcggaggtggggctggcctcggtgatgagccatttaccttcaatgggataaatggaggtcataaacagatctttatcaataaccgggtggtcggtaacgtattcgtttatgctccaggtgccggtgacgatcgccatcttatcgagactgttaatccccgaggcaatggaagaggccgagatatcaaacaccccgccagaaaccggcgtacctgcgcataaaccggtcagacgggccacgtcgtcagtgatttttccgcagcattctgttgagcgtttgatggggggcaatttgtcccgcagttcatcaagttcccaccatgccagtagttcatcgtcatacttgcagtcacgtacgttgatcaggttggtccctgagatatcggtcagctcaagaaaagcctctccggtcaggtaaaaacggatcaggtccttgaccataaaaatataacgcgctttttgcagcgtctcgggctcgaaatccttcagccatgccagcagggcgacaggttgtccggcccagatggactgcatcgtttttggcaaaatgtcggtaaggaattctggtgagcgttgccatctctcaacgtactcttttgcccggctatcggtggatataatgccgttacgcaccgggtgaccttcttcgtcgaccagatacagaccgttaccatgaccggtgacggccactccttttatctggctggcgtcgatacctgattgctcaatcgcttttttaatcacttcgacattcgcggcccacagctcatcgatactgcgctctgtgtggaattcccggggtgtcagcatctgcgtggattttgaggcgatggcgagcacctgtcctttacggtcatagatggctgccttggtgacggttccaccattgtcgatgcccatgacgtattcatctttcattcgcgtggactccttattggttaccataagccgggctcgctggtggttatccctttaaatccggcatggaatattttatctacaaggtatttgcgcttaacaaagcctccggcgatgaataccacatcaaagcctttcaaatttcggctaatcaactccagacactggcaggcatattcagcaggtaagatttcaattgcgtccggtggactgtgtttaacaatatcgagcgactgatcaagcgatcgcgaatcgataagtaaaacccgatatacggtcagcaatccctcttttttggcgtagcgtagcgcggagagattggaagaaataacaccatcaaccttgtaataatttttcagcagattgatccccgcctgatccggtttaaagccgcccagtaattcaaggtgaacgaggaccttcttaccgctttgatggcatttgccaatcagcgactgcagattgccgatattcgcttcggatagcagcacatattctgactggcaggataatgctttctcaaagtatttatacttcctgatggaagggatgatggtgttatttgaaatcatattaatttccgatgttatttagccatgtagaggctgtatgcatcttccgctgttgcgttttcatggatgatggcattcagacctgctaccactttcgccggctgcggatcctgggtaatgtttcgtcccacagccacgcctttcgcacccatctgcatacagtgctgaacaaatttgaagtaaccgtcgatgccggtttttggccctcctaaggcaagcaccggcacgccagcagcttcaacgatcagtcggtcctctggtgaaccggtaaaacgcgttttgatgacgtccgcgcccagctccaccgctgcgcgggccgatgcagcgatgatggccggattgttagagtcatcgctggtgacgggataaccatacgggagcgattcgacaatcagcggtacattccagcgatccgctgcctgtgcgagttgcatcgccataatgtgggttttttcttcattgaaggcgccggggaaggtcatgcagaccacgccctcggcagcgactttaagcgcatcttcgacggaaaaaacgggggtagtatcgggaacggtattgtcaaagatactgaccgtgctgtcgacgcgtaacacaacgggaacgctgttcaatgcttcccgataattcttcaacatgccgtacgtgacgagcgcgcaatccaggccgtgttccaccagagcagggagctgatttatcgtattatcaataccatttgttttcgtggaaaaatagtagccatccagcgctaaggtcacggatttaccgtcttttgcgaatattcttgagagacgacgttctttagacatttatttactcctgagataaaaaaacaaaaaaagccctcagagactcgcgtctctgagggctttctgttcacatacccttttgataatggttcagggatccaaagcattatcaatgcaattttttagcaaagtgagaaaggtttaacttttgtttaaattaaatctgttctcttgcgtgattaaataactaacacacgcgataacttattgtccagttggtatcgttgaaatgagagattcatcacatcaatatgttgtattacctgagaagttctgggttaaatacagaaaccgaccccttaaaaactaggcaataacgcatccggacaaggggagaacgccaggcgtttatttcatccgcatgaagaacgcatccatgcatgctccagccttcaggtcgtcatccccaaacgcgcatttattcctgtccggatggcgtacgaaaacgctatagcaatgttgtcggcatggcggtctgtccccgggatgatttcctccagccgcccgggcaaattactcgtccgctttgtgcgcccaggcaggcatcgccgtcaggtaacgttttgcccgtttccgtgattccgctacgcccaccttttgccaggcgtcgagaaaagccgccagaccggatacggcctcttcccaggatttcaaattaccgtcgctgtcgctgcaatacgcgcaatatttatcgctggccccttgcgcatcgggtgcggacatcggcattccgcaggcctggcaaaacctttcgtgctgtgtcatagagcgctcctcctgtcgtttggttgtctactaaacatacagaatttacgcatggcgcttagcgtttcagatcaatagatcctgccgtaaccgttgttgtggatcttctgccggggagtgcgggagggataacgggaacttactccgtatcgcgcagctatcgcctcccttattttttattgatgcaacggttggtcgcaggccgcgaggattgactcatgcatcgcttcggaaagtgtcggatgcgcaaagatcatcgacaggaggctttcgtctgtggcctccaggtgacgggcgatgccaaagccctggatctgttccgtgacctgtgcgccaaccatatgcgcgcccagcaactcgccggtttcagcatcgaaaatcgtcttcacaaaaccctctgtctcgccgctggccagcgccttaccattgctctgataagagaacttaccgatcctgatgggccgtccccttgccagggccgtcgattccgtcaggcccagactggcaacctggggccgggcataagtgcaaccaggcacatagtcgcgatcgagagggtgggcgccttcgacaccggccagggtctcaacgcagagcacgccttcgtggctggccttgtgcgccagacacggcgggccggctacatcgccgatggcataaagcccaaatacgttagtgcgacaagccgcgtccgtcttgataaaaccgcggtctaactcaacgcccagcgtttccagccccagatcttcaatattcggctgtacgccgaccgccagcagcacacgttcgacatcctcagaatattcgccgccggtgttgtttagtgtgcagcgcaccccggtatcggtgagctgtacttgcgtcaccagggtctgggtatggatctgaataccgcgtttttcgaatgacttacgcactgctgcagacacctcggcatcttccactggcaaaatctgcgacgctagctcgaccagcgtcactttacagcccagatcgttataaaggctggcgaactcgacgccaatcgcccctgaaccgatgattaagagcgacttgggtaaaagcttaggccgcagcgcctcgaaataggtccagatatgttcgccatctggcgctatgcctggcaatgcgcgtggtcgggcgccggttgccaggatcacgtgatcggcccggtaatcgcgcgcctcccctcgggcatcctcgaccgtgatttgccccttgccgcgcagccgcgcggtgccatcaatcaccctcacgccatttttcttcaacaggtacgcaaccccagcggtgagctgttgcgatacggtacggctaaactgcaccagtttctgcagatcgacgttcacctcgcccacgctgatgcccagctgactggcatgggtgatagtgtgcgcaacctcagcgccatgcagcagcgccttggttggaatgcatccccagttcaggcagatgccgcccagatgttgtttttccactaatacggtacgaagccctagctggccggcacggatggcggcaacgtatcccccaggacccccgccgatgatcagcacatcgtatttatcgtgcatagctcgtctcctggataaacatcaaggtcggggtttcaatcagtcgcttgagttcccggagaaaagccgcacctgccgcgccatcgatgacccggtgatcgcaggatagcgataccgtcatttgctgtcgcgcgacgatttgcccgtcgcgtactaccgcccggacctcgccggcgccaatggcgaggattgcgctttgcggtggattgatgatggcgtcaaactgccggacgccgagcatccccagatttgacaggctaaaggtcccgccctggaactcttccggcttcagcgtgcccgctttggctctggtcaccagcgagtgaatttcgttcgatatgtcgctaatcgatttccggttcgccgagcgaacaataggggtaattagcccggcaggcagcgcaacggccaccgaaatgtcggcatccgtaaagcggcggatactttgtgccgcttcatcaaactggatattgacgtcaggcacggccaccagcgccagggcgcaggccttcaccagcaggtcattcaccgaaatcttgacgccgggtacttcgcggttaatgtcctgacgtaacgctaacagtcgctccagatcgagatcgacgctcaaacggaaatggggagactgttgcttggacgtttgcaggcgagaagcgatagcccgccgcataccggacatcgggatgctctcaaagggggccggggcactctcctgcacaggactggtctgcgggtgctcgtcgagtaacaacgccgcggccagcacatcatcgcgacttacccgaccgcgtgaaccgctgcttcggcagtcatgcaagttgatacccagtttgccggccaggcggcgcgccagcggggtggccgatacctggctgtcatcggcatgcgagcggggcgctttgctgcgacgaacggggggcgtcggagaggccaggcgaccgccggcggcaacgatcgcgctttccagatcagaaacagagatacgatccccgcgcccgctgccgcggacttttttcaggtcgacaccccagcgggcagacagtcgtaacgcatggggcgtggcattaacctgagtcacatcggtcacaccttgcagactgacggggatgacggtctgcccaacagggggctcggggctgttggatggcggcgaaacaacggaagctggcttagcgcctgcctgtgccgctacgtccggcgcggcagcctccgggcctggggctgcgggtttcgccgtcgccaggcgggcaacaaattcgtccagttcagcatcgctgaccgacgcgtcagccgccagggccagcacggcgcctacctgaagcgtctcaccctcgcgggcgagtatccgacgtaacgtaccggcaaagggggcctccagcacattgacgattttactggtttcaatctcacatatttcctgccctctggtgaaatcgtcaccctcctggattgcccatcgagcgagcaagccttcctccatggaaagcccccactttggcatttcaagcgtcttgatttcgctcataggttaatcctccagcacttgacggacggcggcttcgatacgttcaacgccagggatccagagtttttcgagagcaggggagaacgggaccggcgtgtgtggcggcgtcaccagcagaacgggcgctttgaggaaatggaatgcctgggacgcaatcagcgccgcgacatcatgagcaaaaccgaagcgtgcagcggattcgtcgacaatcacgacccgccccgtggacgccaccgattccagaataccttcctcatccagcggcgaaatggttcgcgggtcgaccacctcgaccgagatcccctctctggccagtttgtccgccacctggtttgctttatgtaccattgccgacaacgcaatgatggtgacgtcctccccttcgcgagtgtagttggctacacctagcgggatggtatagatctcgtccggtacctcgcccttgaggtcgtacagcattttatgctcgcagaataccaccgggtcgtcgtcgcgaatggactggattaacagacccttgacgtcataaggcgtcgagggcaccaccaccttcagtccaggcgtggtggcaaagatattatagggtgactgtgaatgctgggctgcggcagaaaaccccgcgccgatcatccctcgcatcaccagcggagctctggctttgccaccaaacatgtagcggaacttagccgcctggttgtacagtgcatcgtggctcacgccaaaaaaatccatgaacatcaattccgcgaccggccgcaaacccgtcgctgcggcgccggccgccataccgatgatggccgactcggtaatgggcgtgtcgatcacccgatcggagccgaactgcgtccacagccctttagtgacacccagcacaccgccaaaggcttctattttagcctcttcgggcgcatttccgccatgaccgccacgcaagtcttcaccgatgagcaccacgcgttcatcgcgttccatttcctgagccagggcttccttgaccgcttcacgataggtttttattgtcatggttatcaccctcagtatgagacgtacacgtctgtcagcaggtcttccggagccgggtaggcagcggcgcgggccttcaatacggcatcgttgaccagggcttctacttcctcgtcaatcgccgccagttcttcctgggtgatatgttgcttgaccttagcggtgaaaatcttcagcggatcatgttgttcacgcaggcgttgcacttcaccttccgcacgatatagcgcgggatcgccctcaaaatgaccatgccagcggaaggctttggcctcaatgacgcttgggccaccgccttctcgcgcacgcttgaccgcctctgaggttgcctcataaacggcaaagaaatcggtgccatcgacggtcactgccggcaggccgaagccagcggcgcgccgggcgatatcacgcccacccacggcgtagtcatggccggtcccttcgccgtaaccgttattctcgaaaataaagacggctggaagctggagcacgacggccatattgatggcttcaaagaccaggccctgattagaaccaccatcgcccgtaaaagagacaccgacgttgccggtttttagcgtctttgccgttagcgcggcgccgatggccaggggaggggctcccccaacgatagcgttcgcccccagcattcctttcgacagatcggcaatgtgcatcgacccgcccttaccgcgacataacccgctgtccttaccgaatatttcggccatcatgccgtgaatgtcgcaacctttagcaatacagtggccatgtccacggtgtgttgaaccaataaaatctgcgctcgttaaattttcgcagacccccaccgcgatggcctcctcaccggtgtaaaggtgaatgaagcccggaatatcaccgctggtattttcctgatgcaaccgctcttcaaatgttctgatctcccgcatcttgcggtaagcctgcaataacgcctgtttgctgagcatcgtttaattctcctcaataaaggtcacccaggcggggccaacagacagggcggataaccctggccacacccatgcaatgaatctacgagcggttaaagggagtgcgaagccaccttcatgggggggtaggtgggggttttcatgcttgaggtcaaactttctaaattttgtgtagcaataaagtttggctgccccatgtcatcccgggggctggcgtacaattgaaaaaaacaaagcgagtagacaccacggatgaagccattggatttagaaggtcgtcaatcaccctcactggtctccgggccattgcggctgacgcgaggcttgccgctaatcctgaccaaattcgtcccgcctcgctcctcaatacaattgctggagcgcccccggcttcttcagcttcttaatcccgttcagcagtgccggctgggcgtcgtctgcgccggcgctggatttggcaaaaccacgctgttggcgcaatggcatcagcagatggtcgcccagggggaacgtatcgcctggctgagcctcgatgaggatgatgatgacgtatggcagtttattccttatctgctgcaagcattgcgtccactctatgctgactgggacgccgatttctggcgtgacatggaagaacagaagctctccagctccgagcaactgctggccgggctcattaaccagctacactactgcccgcatgacgtatacctgatcatcgacgacttccacgtgattaacgatcgtggggtctatgaagccgtggggtatttaatcaagcatgcgcctgccgccttgcatctgatcattggcagccgtttccacccgaatcttgcgctgagccagctgcaggcccaggaccaactggtggagatctatgatcgagacctgcaattcacgctcgaagaaacaaaacactattttagccgcacggttgcgctacccctcagcaaccaccatgcacagcggctacagtccgtgacagagggctggattgcagggatgaagatcgcttcattgtccgcagaattacagcatgatcccgagcatctgttgcgcaatatgcatggaggaacacggtccattgcccgctatctgaaagaggtggtactggatccgctgccggaagaggttctcgatttcctggtaaaaacgtccttcctcagtcggttaaatgccgaattatgcaacgcagtgacaggacgagatgatagtaaagcgatgctgacatggattgagcgacacaacctttttttgtcagcccttgacgaacaaggctactggttccgctaccatcctctgttgcaggaaaatcttcggaccatgctgcagcagaacaacgatattgatcgcaaacagctacatgaattagccagtcattggttcgtcgaacagaagctgtggtctgaagcggtacgccatgcgctcagcgcaggcaagccggtgcatagccccgtacaggacggcgcaagcgctcagtcactggcggaagaaggggatatcgataccctgatttcatggatgcatcatttaccgcccagtaccgatccttcgcgcattgacctgcaaattaatctggcctgggcactggcgcattatttccactttgatgagtcgaggcagctgcttgataacctcgatcagatggtacttcatcatcgtgaggatttaacccgcagcacctggtgtaaattgcgcgttgtgcgggcaatttgcgaagcctttgcggaaaacatcccggagagtctggctatcgttcagccgttgctggccgaagtgccctgcggcgacacctgggttgatggtctgatatgcaatattctcagctattgccatgttgttaaccagcgctatcacgacgcgctggaggttcaacagcatatgccctctccggaaagtcctttagataatctgtttgtttcggtttatcgcgcgtttattattgcccagtgccatctttgtcagggcgatctgggaaaagccgggtggtatgcagagaaaacgttgcgccaggctgaatgttataccggtacccagtcgaccagtggcgcgacgctggcgccgctgctggcggagatagcctatgaatgtcagaggggtgactcgcccgagcatctgccagccgaccggctcgaattcatcgaccgattcagtccacccgacgcgctgagtcgttgctatacctatctcgcgcgtcaggccttagataacgatatgccctatgaggccgagcgattgctggagcatgcgcagcgtcttgcggtgtctcgcggctggcaacggctccaggccatgttgttagccgagcaggtgagggtgcgactgcagcgcggcaatgtcaccggcgcagagcaactgcagcgacagcttgaacaaatggccgccagcttcagaatggatgccgaacatccctgccaacgcgccatcgttatgtctgcatcccttagccgcagccggcttcttctcgccagaggccaggcaccgcaagcctgcgttttactggctgagatggtctccgatcaggaaagccggggggacaggttaaccgcagcgcgtctgcgtacgctctggtcattggccttgtggaacagtggcaaaacggccgctgcgcgcacgacatttcagccagtcgtgcagctggctgaacaacagcatctcacgggcctctttcttgacgctggcgataccttgcaacctttgcttgccggtatgaatgaaacctcttcggcttgcaaagagaaagggggagtgcatgaaccctgggccgacaagcgcgcgcctgcagacggaacaccgtttaatagtggaagccccgatattcctggcgagctcagcgagcgtgagtttcagatattacagctaattgctgaaggtcagatgaacaaagaaatcgctcgctccctcgctatttctgccgagacggtcaaatggcatatcaaaaacatctacgcgaagcttaaagtgaatagtcgcactcaagcgatgagcagggcgctggagatgaaattactggattaacggtttgaagagggagggctggatataaaatattattaagatggcattgctcattgccgcttacgttaaggtgctatgagccatggataatcgagatacttctgagcccgcgggagcttttatcactgaccgtgatggtagttttgatgccttggctcagcgataagagcatggaatttaagtgcatcggtctccggggaaagcaaccctggtgtaaacccagagaggcttttaaagaagcgttttctgtaacgttttgattgaggtggtgcgataataggaaccaataaatcaagtcaactatatgattttatttataaaaataaaatctaaaaatggagctatacacacggctatacacattggcggtcgcgttcatttttcatacgaattaaataacagaaaaaaactttttttggggaaaactgttcacactgttcaccaggcacttttatatttaatattcaaatagttatgtggtgaatagttggtgaacagtgaacactttactgttcacctctgcaggctatagatacaagcgttatagtctgttgtgagcgaggagtggaagataggggggtaagccaacctgcacattgggataaggatgtactagtacctgatgccctagataaatcttaggcatcaggtatgcaaaaatgggacatggagcatagggcagcaggtttaaatcaaatgaaaccctacatgaagcatggataccccaaagggttagtcagaaaaaagccgggcatagttgataacccttgacatagtcatctgctgaccattatctccatttgcctttggagtctgatcatctggtttcttctgcggctgtcccgctttagagagcgaggctgccggattgagctgggcattctgtctcatattcattatctctaagtacctgttgtgaattatctttaatgtttcttttaagtttaaacagtatcgattcttggcaaaatcattaaccaaggggatgttattgaactcgattccgttgcgactccagattgctctatacacttttccgccagaaaacgggtctcgcctgtatgcatattgtacagcacttgagactttacacctaactgatgatgctgaaaaccctttgtgacgtctctttttcctgagtttcttttcagtatagtagatgcattcagcagcaaatccccctccagacgaacctaaatcatagacgaccggcttgtgtcttacttgaaccatcgggggtgtgtacatatcgtacatgatatcacctgtgcttttttcaaggacgaccatgccgaaggaaaaatcatccacatccatgtacaaactcatcaggctggcgtattgatcgccggttatcactttcaactgaagtgcttgcataagagctatcataggatgatctccacacataaaagagatggccttgcgccccatgaagtcgatgtggattgccttcttttcaagaacatcccttcgcggacgcccatcagaagaccatttcccatcacatgcagcaaattcgtattcacggtatatcgttgttgtcatatgaaaagctggattatttgaaatcgctataaatgtaacacagttaatgtcccttcagccaaatgagacttggaataaagcgtataaagaggccttaaactcgcaccagtataattgaattcatcggacaaatacgctacggagttcgcgaatacctggggctaaactcccgcttctggcactgagaggtctgataacgtttaagggtaaacagttttttctgggaaaactgttcacactgttcacttggtgtttttattatttattttcatgacgttagcgagtgaatacttggtgaacagtgaacactttactgttcactctggccggtgagcaggtaaaaaaagaccggcaatgccggtccgggtaggttatgaagcggtgggttcatcacacttcggcagccagtcggcgttgctttcctccctgagagcgagattggtctgcataccctgatttgtgcggcgcttctcataattcagtccgtactctttcagcatggctgagagccccttgccgaacatggtcaggctgagtgcgttcctgtagccgtgggcctccatgtagaccagataggcgtgatacagatacaggcgcggctggcgcgggatgatgttcgcgttccccatatacatcccgtccggctccggcagtgcctccagatagccgcaaaaatcaaacgtcgggtcagcatcgcgtttaatactgagcgcctcgtcggagttctgctgcgactgaagcagtgaacgggcactcatcgggtcgctgaactgctgcattaactggcgcacaatcacggccagctcgcgggcgattttatccctgagctgcgggtcgcgctcctccggggctatctgctccgggaagtggataatcacccggcgacgtgacacgccgccgctgcggtcggtgaagcgcatcgggttattgttcacggccagaatgaccgccggaatatgcgtcgagtagggattctggtatttcgggtcgaccgacaccgcatcgccgccggtgatggccttgagtccggcaccgtccccgctccatttctcctggtcaggcagacgaatgagcgagaagccaatcagggaggcacgcttgcgggggtcttccagcgtgtcgatatcggctgacgtggcgttatcctctccggccagcatcgtggcgatttcggcgaggatacttttcccgctgccgccggggccggtgacttcgagaaagagctgccagtcgtagcggttcgccagcaccataaacagcgcggccagaatcacgtcgcgttttgtcgggttgccactggccgcccggtcgagccagcgccagaagttcggcgcgtgggttttcagtgtttccccttccactggcggggtgaaatccacgtcgcacagggtgcgcagccagtgcgatttgctgtgcgggctgaatatacctgagcgggtatcgagcaccccgttgcgaaaaccaatcagacggcgtgccggtgcctcctgctgcggaataatcagtttcagggtctccaccactgacgcaatcctccccgatgaaaacggggcgcgcaggcgctgaaacagcccggccacatcgcgggcaaaatcagacggcgttatcaccttccagatgccgttttcataccgggacaggagctggccgttggcatccacggccagcgcttcgccgtaatgttcatgcacccgcattgccttatcactggcgctcatggcggtaaattccgcctcgctcatggtgtcgaacgggctttgggccgctggccggatggcggcataaatggccttccgcgtggtgtcttcgcctctgagcatcaccgcatcattccagtcaccgaacaccggcggcagggcgacaacgccctcacaggctgctgcggccgcggcggcttttgtctggccgtcgccgttaaggtcacggtcagcggcgaggataatctgacaggccgggtgtttctgacgggccaggctcgccagagaaagaaggttcacggacgacagcgccaccatgacggtttccccggtcaggtgatgcacggtaagggcagtcgcatagccctccgctatccacaggcgtttcccggcctgtttctgcccgtcgatgagatggcatgctcccttgacctgcccgcccttcagggtgcgcttgagcccctcagcattaataagctggaggttaaccagcgtgccggactcgtcatacaacggtaccgccacatcaccggcgcggtaggccacgccgccggttttgtgcgacgtggtcagcgtcagacactcacgaccggcaaagcccttgcgggtcaggtaggcgttgccggtggccgggcgcgttttctccagcagtctgacggccagcgcggccgctgctttgcgctcggcctccgttccggcgtctgcggccgccatcacctccggggccaccggcggcagatggccggtgacggcgttcaccttcccggcggcctcggatgccgatatgccgaacaccttctcaaccagtttcaggccgtcaccggcgccacactggttacagaaccatgtgccacgcccctctttatcgtcaaagcggaaacggtcagcgccgccgcacaccgggcaggcctgatggcggttttttatcactttcattcccagcgcagggagaatgcgcggccagtgaccgcacgcctgttttacggtgtccgttacgttcattttcatggttttctccctcagtgcagtacaggcgatgtcagatggcgggcgcagagctcatccatcacggcgagcccgaggaaggacagcgacggggcggctttcagcggcccggcctgcatcaaatcttccagcagcgcacaggcaatcaggcggcctttttcctcgccgtgctggcgcaggtagaagccctccagctcggcggcgatggcgctttccagcgcgtcgagggtgaggtgaggatagcggtgctgacgttcgcacagggtcagccaggcacaggccacggcgcggcgatacagggcggcacgtaatacgggcggtaatggcgttttcatacgttgccctccccggtgaaccagcggtgattacagcgttcgaccacgccgtcgagctgggcggtcatgaggtaaatcacggaggtgagctgcaactgctgagtcgggtcacgacgcagggaagtacagtcctgcacctgcatcagctcgctgacgagctggccgacattgcgcatatgttcaaggcattcgaggtcacgggcagtaatcgtggagtgtctcatgcacgcacctccgccaccggcagacgcccggcaaacgagaggacgtaatcgcgaacgagggactggcgtgcagcgtgttcatccccggcgacggcgcggagcatacagatgcggggctgacggtctgcgcgacgaacagcggcaaacacaaagacaaactgcggatgtgacggggtgagggtcgtagccataggggcaacctcctgtgaatagcggttattgccaccaccggagttcctacgctcatgggtggtgacccggacgggggtaggaataccggctccacagaataccggccagcccgaaagctgccccgcccggaccaccattatcttgccggagctacggtgtgcgcataaacaccacagcccgaaaaatgggtgtgcctgagctacgacgtaaaaaaagacgcatggcgcgtctggtgtcgcctgtgaattacacgggttcctacgcccggctgtcgattttgcgacagcgataaaactatacctggaaacggcgaagggaagcaagccagaaaaaggggctttttgcggaacgggcatcatcatgcgtcatagccccggttgcgttcggcgatacggtcggccatccacccggtgatttccgactgcgcccacgccacgttttttccgccgagggagatttgtttcgggaaagcctcccggctgatgaggtcgtaaatcgtggagcgggacaggccgcacagatgcatcacttcgggcaggcgaataaaacgctcctgagcggcatcagaaaccggcatcagcggcgcggcaggggctgaagacggggaagaaaaagcggtgtgcatcgggctacctcataaagtccatacagtgccggtcgtgtccgtccggcctcgggtagctctctattttgtgaatattttctctgagggcaacaagtcattttgtagtggcccaccacacaacagaacgatttttagacagtggcaaacgttggtcatcttttggtaaacgttggcaaactggtggcccattcctgattacttttatttatatattattattttttaatcgcaaaaaagactaaaggagcagggctccgtcaaaacagaaaggtgaacagtagtgaacagtcggtgaatacttctgacctcaactgttcaccacttaacttactgtattacttattcttttatttaaagtgaacagtagtgaacagttatatgtaaaaaaacaaacggtgagtatgcttttcctgagacctttctctggcaagccggattttgacttcctgattgtgccagaactgccacaaccgcaacaggtcgtgttgttgtgtgtgccccggcagaatcacctcatgttgaaaccacgaggaaacctgccatgaccgacaccacctttatccctgattacctgaaaccggcgctggagcgactggccgcagccagagcggcccatcttgaacaggcccgcctgatggaggacaccctgacggccatcacccgcgcagaggagcagaaagcggagctggagcaggacaacggcagcgacacccgcacctggcgtgctgctttccgtgccgggggcgccatgctgacggatgagctgaaaagcggccatatcgaacgcgtggcccgccgggagctggcgcaggaatgccacaacctgaccgaagtgctggcctttgaacgtgaccagctgaaagccacctgcaacagcaccgcgcgggcattccgccaggcgcatcatgctgtgctgagtaaatacgctgaggaagagcttaaccgcgcgctgaatgacaccctcgggccactggtccgggcgatggtgctgaaagcggaggtgatggcaaacccgctcgccaacaccaccggccatcaggggtacaccgagccggagaaagaggtcatgcatcaggtggtgaccttcctgaccgggaaagtgagcgccttctccgtcacgccagccgatgagccggtgctctccctgaccggcttcccggccgtcgcgcttgcgcatatggaccacgacgccgccagcacgcccggcgagcgtaaggtctggcaggagaaaatccgtcagcgcgaggctgacctgaaagcgcgggggctgctgccatgatgcactgtccgttctgcaaaaagtcggcgcatgcccgcacctcccgctatctgtcggagaacgtcaaacagcgctatcaccagtgcaccaatattgagtgctcggcgacgttccgcaccactgaagccatcgacgaggttatccggcccccggcggagaaagcgccgcctgtcgcggagccggtcacacccccggcaccccgtaacgtgcagggctgctacagctcgccataccgtcattaatcaggggagaactgaccatgaccaccctcacgctacagcaggcctttgaagcctgtcagaagaacgaaaccgcctggctgaaccgtaaagccgaactggcggccgcagagcaggaatatcaggaacaggtgctggccggggatgaccgtatcccggcaattatgcaggaactgcgcgacattatcgatgtcaaaaaatgggagataaatcaggccgccgggcgctatatccgctcccatgaagcggtgcaacgcatcagtatccgcaaccggctgaatgactttatgcaggcgcacgggacagagctggccgccacgctcgccccggagctgatgggactcagtcagcagcccgcactcctgaccggccatgcgctcgaccgttcggcgcattacctgcgcgaagcgctgtcagtgtggctgagtaccggtgaagaaattaattatgcggcagaagacagcgatattttaacggccatcggattcaggcctgacgcggcttcgcgggtggataatcaggaaaaatacacccccgcacagagcctgatttatgcccgccggcgcacggaactggccagtaagtagctccgcaaaaaatccccgaaaataccgctatttttcccgaattaagccatgcatccacagggtgcatggtcttgcatgcgtttcctcgccctgttattcctgtccggcccctgtcccggcgcggcctgagccccccgatgcacctgcatgaaaaccgacccctgaagcgggcaggcgaggcggggaaagcactgcgcgccagcggtaaagtatttatttaatgatatttaatttcgcggcctgagcgcgtcgctgcgctgcgcgggttcacgggagtgtcggtgggtggtgcggcgctgttcgggggcatgtcgggtttctgaggtagagatcattctgcactgaccgctcatctccttgctcatctggttcttggtggggatgtttaaacgtctatgtgcttttaagagctcaggctacgaagcaggctgatgtgccgaacactttgtatcaagatgatgattaaaataaggcaagaaaaaattggttaattctttatgtattagatttgaagaatttttgcgcccttagctctcctagagcgcacgttatcataaagtgaatttattaatcctctttgtctttgtctttaatggtggagtctattcgtcttctttccagagttttagtgatattcattactagtattcctttattttgtcttgatgatgttttgatgcctatatcatttgctagtttttttaattgttcaatggatagatcatttaatgtttcatttggctcactgtctgactttgaacttttgttatgtatgtgtcgaagtgaatacatatccttggaggacttgaggtagtcttctttttttagtatttgtgaactttgtttttctttaacgatgggggttggtttttttttacgagcatcaagtaaattcagtatgtcatcaagtgcatattccacgcttttgtttgggtaatgcgccattatcttggagatatattcaatcaaagaaattaactcatgagttttcattatatattctccaacttttcataaagttcgctaactacttgagttagatattcactctgtttttctgcattaggtttggaacgaggtaaagaagagtggctaaatactgttaaattgttttcggacgcaacggatataccgtccccggctgtgatgtagttattgaacaccatgtttggatgctgttttttaacatcattgattgtgtcctcatgagtttctttgggctttttattatattcgtctaccatattaaatataatcccaagcatttcggtgtcattaaattcaatagatgagttagaatattgaatcatccctctaaagtttttattgagcttatccatttcagattttattagggaaataccaaccgtggaaagaaagtctggaattgcagggataaggtacagttcacttgcaaagaaagcattttgtgtgacaagattaatatttggtgggcaatctagaataatgtaatcataatcttctgcaacctgatctatggctttttttattattgccatcttatcgagttccaattctgtttccttttgatgagttgatgcacttttcttttctcttgccaacatcatatcaacaagaactagttcgtgatgagaaggtagcaaatcaacgttgatccagacctgaccagggcttgcagttatcggttgttttattatagcgtcgcgagtatggaattgctttccatcgaaataatcatcaaaaatattttttagtgtgggcttttttttggtgtaaacatgtctgacatatttttccacccccaatgctaaatatgatagatttgattgaggatctaaatcaatgagtaatacttttggatgctcgtcggaaccgagcatcagcccaaccccaagatgtaaagataatgtggattttcctacaccacctttccagttaatcatgcttatcacttttgccatgtggaatccttaattgagtaaatatagtcattataccattgtatcatcgagcttcttttctctagatactgtgcgtgattgtatgtaccacgaatgctatttttgtctacatgtgccagttgaatctctatccatgcactgtcgaatcctttctcgtgtaatattgttgacatagtgtgcctaaacccatgtccagtgagcctcccgccatagccaatacgcttgataacctgatttatactcgcctcactcatcggcttgttcggatcgttccgccccggaaaaacataacgatagttacccgtcatcattttgagttcattaagtaaatctaacgcttgagtcgacaatggcacaagatgtgacctgcgcattttcatcctttcagcagaaatttcccagatagcgttatctagatcaaattctgaccacaatgcagcacgtaattctatggttctcacacccgtaatcatgagtaatttcgtagcaatctggacaagccgactccctgtgtaactgtctaaggcacgtagaaaatctggtagctcatcagcttttaggaacgggaaatgattggattgatgtacttcgagggcgctcgagagatctgcagcaggattaaactcagctctcccagtagctatggcataacgaaacacttctgaacaacgctgtcgcactttgcgcatcttctctaaggccccgcgtttttcaattttacgcagcacattaagcagttctagcggttttatttcaccgatgggtcttgtccctacatacgggaaaatgtcgttctgaaacgcttccatgatatctgacgcatatcctgccgaccattttgcggacttcatctgatgccactctgtagctatcttttcaaacgcactttcggattccgtttgcaatgcgatcttctgctcttttcgaacttcactcgggttctttccttccgcgaccagctttcgggcatcgtcgcgacgagaacgagcatcggcaagggtgatcgtcggatacacaccaagcgagatcattttgggcttaccggcatagcgatagcggaaccgccagctcttgcttccattaggctctataagtaatgacaagccttgcccatctccaagtgtataggctttagcttcaggcttagcgcggcgaatctgcatatcgtttaaaggcatgtgtataggaatccaggaccgaacaggaacatatacacaatcctatacacattctgtatcggattctactggatggttacggacgatgatggactaaaaaacgttaaaatcgttataaatcagggtgtttatggatgaatgcggacgtctggggaagttgaaatggtgccgataataggagtcgaacctacgaccttcgcattacgaatgcgctgctctaccaactgagctatatcggccctgcaagaggtgttcacgagcgtgaatcacgaggcaaaaggttagaacttagcgggcgatgcgtcaatagccagtggaatcaactgcctatttttgcatcgcccgttctcatttacgcacgaatggtatcgtcgccgaaaccaatccacttataggtggttaacgcttccagccccatcgggccgcgggcgtgcagcttctgggtgctgaccgccacttccgcgccgaggccgaactggccgccgtcggtgaagcgcgtggaggcgttcacatataccgcggaagagtccacttcattgataaagcggttggcgttacgcagggtgcgggtcaggatggcgtcggagtgctgggtgccatgttcgcggatatgggcgatagcctcatccatatcagtcaccactttgacgttcagatccagcgacagatactcgtcgtcatactgctccgctttcaccggctcgaccttcgcagggccgttttgcagcgcggggagggcggaaggggcggcgtgcagggtgacgccgctctcggccatctgcttgcttaacgccggcaggaaggtgtcggcgatgttgcggtgcaccagcagcgtttccacggtattgcaggtgctcggccgctgggtcttggcgttgacgatgatcttcagcgcgggggggatctcggcggtttcatcaacgaaaatatggcacacgccaatcccaccggtgatcaccgggatcgttgactgctcacggcatagcttgtgcaggcccgcgccgccgcgagggatcagcatatcgatgtatttatccatcttcagcatttcgcccaccagcgcgcgatccgggctctcgatagcctgtaccgcggcggccggcagaccgcactcctgcagcgcctgctggatcaccttcaccgtggcggcgttggtgcgccaggtctctttcccgccgcgcaggatcgccgcgttgccggttttcagacacagggaggcgacgtcgaccgtcacgttaggacgcgcttcataaatcacgccaatcacccccagcgggacgcggcgacgttcaatacgcagaccgctgtccagcagcccgccgtcgatcacctggccgaccggatcggccagattgcacacctggcgcacatcgctggcgatgccgctcagacgcgccggggtcagcgcgaggcgatcgagcatcgcttcactcaggccattggcgcgagcttcggctaaatcttccgcgttggcgcgcagaatatcgtcggtctgcgcttccagataatcggcgatcttttccagtacctgattcttttcccggctggagagtaacgccagctgccaggaggccgctttggcggcaatgcccatttgttccagcattttcagctccttaacggatgatcatatcatcgcggtggacggccaccgggccgtattcatagcccagaatggcatcgatttgctgcgagtgctggccggcgataaggcgcagcgcatcgctgttgtagcggctgacgccgtgagcgatgtcgcgtccttcgctattgcggatgcggatcacttcgccgcgggagaagttgccgctgacgattttgatgccttttggcaatagcgagctgcctctttcgaggatcgcctgggtcgcgcccgcatcgacggtgatttcccccgccggcggcgcgccgaagatccagcgcttacggttctccagcggagactcctgggcgtggaagcaggtacctaccggcaggcctgccatcgcatggccgatgacgtccggacggttcccggcggcgatgatggtatcaatccccgcccggcaggcgacgtccgcggcctgcagcttggtgcccatgccgccggtgccaagtccggagacgctatcgccggcgatggcgcgcagcgcgtcgtcgatgccgtaaacgtctttaatcagctccgcctgcgggttgctgcgcgggtcggcggtgaacaggcctggctggtcggttaacagcagcagcttatccgccccggcgaggatcgcggccagcgcggagagattgtcgttatcgcccactttgatttccgcggtagcgacggcgtcgttttcgttaatgaccgggacgatgctgttatccagcagcgcacgcagagtgtcgcgggcgttgaggaaccgttctctgtcttccatgtcggcgcgggtcagcagcatctggccaacgtgaatgccatagatagaaaacagctgttcccacagctggatcagacggctttgtcccaccgccgccagcagctgcttggaggcgatggtggcgggcagttccgggtaaccaaggtgctcgcgcccggcggcaatggccccggaggtcacgatgacaatacggtgtcccatggcgtgcaactgtgcgcactggcgcacaagctcgacgatatgggcgcggttcaggcgacgggacccgcctgttaaaacactggtgcccagttttaccaccagcgtctggctttcactcatgattctctgccgttcaaaaggaatatcgatatcgagctgatgttgtagcaggagtcggcccgcttgccaacacccggggcggcgggcgcgccattttattgcgcgggatcgggcattctggagagggaatgtgacaaaaatatgtcagatacatttaaatacccttttttataaaaagttccatcttgtcataaatatttaatatcccggcgttaaaaaacctccagtttttgatgggcgagcgcccgcaattgaatagcgcgtataaataaatcaccaggactgaataatgaaaaagagtactctggcattaatgatgatgggctttgtggcttcaacagcgacgcaggcagcggaagtttataataagaacgcgaacaagctggatgtgtacggcaagatcaaagccatgcactatttcagcgactatgacagcaaggatggcgatcagacctacgtgcgtttcggtattaaaggcgaaacgcagattaacgacgacctgaccggctatggccgttgggaatctgaattctccggtaacaaaaccgagagcgactccagccagaaaacccgtctggcgttcgccggcgtgaagctgaagaactacggctccttcgattacggtcgtaaccttggcgccctgtacgacgtggaagcctggaccgatatgttcccggaattcggcggcgattcctctgcccagaccgataactttatgaccaagcgcgccagcggcctggcgacctaccgcaacaccgacttcttcggtctggtggatggcctggatctgaccctgcagtaccagggtaaaaacgaaggccgtgaagcgaagaaacagaacggcgacggcgtcggcacctcgttaagctatgatttcggcggcagcgacttcgccgtcagcgcagcctacaccagctccgaccgtaccaacgatcagaacctgctggcccgcggccagggttcgaaagcggaagcctgggcgaccggcctgaaatatgacgccaacaatatctacctggcgaccatgtactctgaaacccgcaagatgaccccgatcagcggcggctttgccaacaaagcgcagaactttgaagcggtggcgcagtatcagttcgacttcggtctgcgtccgtccctcggctatgtgctgtcgaaagggaaggatatcgaaggggtggggagtgaagatctggttaactacatcgacgtgggcctgacctactacttcaacaaaaacatgaacgccttcgtggattacaaaatcaaccagctgaaaagcgataacaaactcggcatcaacgatgacgacatcgtcgcgctgggtatgacctaccagttctgattaaccgcagaaccacccgccgcagccctggctgcggcttttttttagcggcgattcttcgccagatgcagggtgtcgctgttcatggtgatctgcgcgttatactccttcggcagacgacgcgcctgatagaacgccgattcccagtaagggttgtccagcgaagagcgcatcacgccctggctgctcgaggcgtgaaggaaattatgatcggtatcgtaaaagccaacgtgcatcccggcccgggtgcggaagaacaccagatcgccgggacgtaaatcccgcttattgacccgcacgcccatgtgcagcagctcgcgggtggtgatccgctccatcggcaggttaaagcgatccttcagcgtgcgccagacgaaacccgagcagtcgacgccgctttgttcagtaccgccccattcatagggggttccctgccaggtgtgcatctgatcatgcagggccgccaccaccgggatcagatcgtccgacccgctatcaatggtcatatccgcatgagattttgtgttctttgcctgtttcggtgaggaggagcatcctgccaacaacaaaaaaggaattaaaaagagagcatgcgtcagttttggcttcatatcgttattttcgaagtagcaagcagactgctttgttttatagccgattaaaaaccacggctgaataagccgaggccgcctttacgtttatttacgattaaaaataaacaacctcgggctggatcagccataaagggcagttgtcactccgcaacggtctgtgccaggatgctgacaggaacatttcacgaggcattccatgacgcattacgccatctctggtgagactttgcccggcgccgctttcgacgcggggtggatgacgtctgcgcctcatcatcgcttcgccacgctctgcccaccgcctccccctccagaccgggtagttttcggcgcttaacgccgtctttagcaggcgcttacctgccggtatgacgcttgttaccttgtgtttgacgttctggagcatgctatgcacgttcgctattctctgctcgcctcgcaggcgacaacggccctttttgtgctgctgtggggcagcgcggccatcttcacccgctggggactggataacgcctcgccgatggcgctgctggtctttcgttttctggttgccctggtcgcgctggcgccgctggctatcgtccgtcggcgctggctgcccgcgccgggcacccgcctgcagacagctgccaccggtctgatgctgattggcggctattcggtctgttacttcgaggcgatggccaacggcgtgacgccgggacttatcgccaccatcatggggatccagcccatccttacgctttgcgtggtggagcgccgcctgcaggggcggcggctgtcagggctgctgcttgccctggcggggctggtgctgctggtgtggcgcagcctggcggcctcaccgatggcgacggtggggatcctgtttgcgctggcggcgctgctgctgatgacctttggcgcgctgtggcaaaagcgcagccgtcaggcgccggcggatgtcctgccgctgcagtatgccgttagtctggggctgtgcctgctgattgccccggtcagcggctaccagtttaccgttaacgccgggttgattattccggtgctgtttctcggactgctgatttcggtggtcgcccagctactgctgtaccgtctgctgagcgcgggaaatatcgtcaatgtcaccagcctcttttatctggtaccagcgatcacggcgctgctggattatctgctgctgggcaaccggctgccggcggcggcgatgatcggtatgatggcgatcgtcggcgggatcgtgctggtgttccgcaccgcgaaggtccgcgccggctgatggcgagccgggcgctgcggcgtccggttcattttcctgtcatcttttttacgcatgctcccggcagcttattttgaccagtaagggaaagtatcatgggcaacacgctgacgatttttgatctcgataacaccctgatacagggcgatagcagtacggtctggagccagtttatggttcgcgaagggctggcgacgcagaaggggtatcttgcccgcgaggcgcggctaatggcggattatgaccggggagagatgaatatcgccgattatgtggccctgatccaggcgccgctggccggaataccgaagtcggacgttgacgcgctggtggcccgctgcgtgcgcgaggcgatcctgccccgggtctatccgcaggcgtgggagctcattcgtcgtctgcgggccgagggagagcagatgctgattatctccgcctcggttagcctgctggtgcaggcggtggccgccgcgctggagatcgatcaggcgctgggtattgacgtggcgatggtcgacggcggctacagcggtgaaatcaccgggatccccagctatcagcaggggaaggtggcgcgtctggcgcagtggcgcgaggcgcatccgcagtatgacggcgaggtgacgttctataccgattccattaacgatctgccgctgtgcctgcatgcggatcgcgtgcggctggtcaatccctgtccgcagctgcaggcggccggtgccggatacggctggccggtgctgagctggcggctggaatagcggagcggataaatgcttgccgggcctacagacagtcggagccggacgagtaggccgggtaaggcgcagccgccacccggcataaacgcagctccgtgcctgatgccatcgcccggcggcgctgcgcttaccgggcctacagacagtcggagccggacgagtaggccgggtaaggcgcagccgccacccggcaataaagcggctccgtgcctgatggcatcgcccggtggtgctgcgcttaccgggcctatgaggtgtgagcctgtgagaggccccggtaggccgggtaaggtgccagccgccacccggcaaaataacggcgcaaccggaaatgtccctgcccgcgctgcgcttagcagggctacagtttctatgttatttccggacagattgcgctcccaatattttttctgcgctatgtcactcatggcgctgggagcgcacagggggcggccagtcgccgccgccccctgtacccccgggctccggccagcaacatcgccgctgcgcggtcccttcgacttatccctgcaggcttcgggtcgggccgaggcagcgtccctgcaaaacacggccctcagcccgcatccatgcgggctgccccggccttccgggaacgtctcagcgatgttgaggccgccagcaccggcagtttcagcagcccctgcgccagcggtgatttggggttgtaggccgggtaaggcgcagccgccatccggcataaacgcagctccgtgcctgatgccatcgcctggcggcgccgttgcttgccgggcctacagacagtcggagccggacgagtaggccgggtaaggcgtagccgccacccggcataaacgcagctccgtgcctgatgccatcgcccggcggcgcagtccaagttgcttgccgggcctacagacagtcggagccggacgagtaggccgggtaaggcgtagccgccacccggcataaaagcagctccgtgcctgatgccatcgcccggcggcgccgttgcttgccgggcctacagacagtcagagccggacgagtaggccgggtaaggcgtagccgccacccggcattaacgcagctccgtgtctgatgccatcgcctggcggcgcagttgcttgccgggcctggagacagtcagagccggacgagtaggccgggtaaggcgcagccgccacccggtataaacgcagctccgtgcctgatgccatcgcccggcggcgcagttgcttgccgggcctggagacagtcagagccggacgagtaggccgggtaaggcgcagccgccacccggcataaaagcagctccgtgcctgatgccatcgcccggcggcgccgttgcttgccgggccaacagacagtcggagccggacgggtaggccggataaggcgaagccgccatccggcgcaaaggcgcgctagcgtccgccctgatacagcggcaccgcggcgccgccgatatagcgacggcgcagccaggcggaaagggtgtccatgatcatcaccaccgccaccagcagcagggtgataaacatcaccacatcccagttccacagacgcatattctcggcatagataagcccgataccgccggcgccgacgaagcccagcaccgccgcggagcgggtgttggattcaatctgatacaggctcagcgcgaggaaggtcgggaacgactgggtaaaaatgccaaagcgatgcttttgcaggccgttcgcgcccgcggcggtcagcccacgcccgggagatcggtccacggcttcgtgaccttccgcgtacagccgtcccagcaggccggtgtcctgcatgatgatcgccagcaccccggccagcggcccgaggccgaccgcacgcacgaaaatcagcccccagatagccatgtcgatcccgcgcagtacatcaaacaggcggcgcatcagcagggctagggtccccagcaccacgccgcgcatgatgttgcgggcggcgaagaaggagagcagcagcgccagcaccgtggcggtcagcgtcccggcgaagacgatggccagggtgacgccgatttgcgtaaagtaatagccgaacggccagttccagaagtcgtgccagacgaacatccgcgccaggtagcggccaatctgctgcaggccggtggtcagctgctcgccgctgacgccgaactgcagaaaaaaccagacgtaatagagcaggcaggccagcgccaccagcccgacgtagcgcaggtagcgcccctggacctgatagagctgcttatgctgccgccggctggcggcgagatccggttgcatgtgccagacgctcattttttcccctccagtacccacaggcgcagacgaccggacagcatgtccagcgccgacaccaccagaatgatcagcagcagggtgatgctcacctgatcgtagcggtcgagcttgatgttggtcatcagctcctggccgatgccgcccgcgcccaccagcccgagaatggtcgacgagcggaagttgatttcaagccgcataaagccataggagagaaacagcggtttcacctgcggccagagggcgaagcgaattttctgcagcggggacgcgccgcaggccgccaggccgcgtaccggtttgttttgcgcgctttccaccgcctcgtagaacagtttggtcaggctgccgacggtatgcagcatcagcgccagaaagcccgggatcgcgccgatgccgaacgccatcacaaagatcaccgcccacgccagctcgggcatggtgcgcaaaaacgccaccagcacgcgaatggcaaagcgcaccggcgccggggaccaggcgttattggcggcaagaaacgcgaaaaccgtggcgatggcgaccgccaccagggtcgaggccagcgccagctgcagggtttcccagatcagcggcagctggatcggcaggcgatagccccaccaggccagcgaccctttggtctgcacatcggcgaacaggttgccggcgctcaggggcggaatggtctctgccatatagtcaaagaagtggggcagcgagtgccagatagtcagcagattaaattccgcggcgctgccggcggcaaaatagagcgccagcagcagcagcgaccagcagacggcatcgcgcttttgccgcgagcgtacctgctggtaatagcgttcaaattcggtgtgggttgtcttcatgcgtcggggatcttcaacgtagcgccgccgcttaccctggggcaagcaggcggcgttgaggcaggattaacgcgcgctcaccagctcgcgtttcatatcaataatctgctggaagtcagccacgctgcccgggccgatgtgctgagtaccgcccatcgctttgataaagcaggcgtgatcctcggtgtccagctttttcactgccgccacgaccttcgccttaaagtccgccggcagcgcattgctcaccaggatcgggccgttcgggatcagcggcgattgccagataatgcggatctgcttcatcagatccggatgatccatgcgaatcaggcggttgaacgcgccggtagtgtagccggtgttgtaatcgccaaccatcgaggcccacgtgaccgcgcccgcgaattggccattcagcacgccgaggatgtcctgctcatggccgccggagaaggtgacgctggagaaggtgttgttgtatttgttgtcggcgttaccgccaaatttttctttaaacgcatggttagggatcagatacccggaagtggaatccggatcggcgaagccgaaggctttgccttttaaatcgtccagcgttttgtacggggagtcggctttgacaatcaccaccgagtgatagccgcgagactgatctttgtcgtccacggcgatgccgacgatatccaccgcttttggattattgagataaaccgaggcgtaggaggagggggacatgctcagcaccacgtcgactttgccccccagcaggccctggatcaccccggaatagtcggaagagttgcgcagtttggtatccacgttcagctctttatcgaggaaggccttcacgcactggttatcgccgatttgctgggtggcgttctggccgccgagaatgcccagattgagctctttcggctgcgccgccgctgcctgccatgccatcatcatgcccgcgaccattgcggataaacgaactgcgccagtcatatattttttcattatgttgcccgtgtgagtgaaattaatgcaattggctaacttcatcgccgtacagccgctgcagcacatcctgcgtcagccgggaggggtgatcgtcaaaaataagctggccgctggcgacgccgataacccgggtgcagtaggccctgaccagctccaccgaatgcaggtttaccatcacgctgataccctgctcgctaatctcgcgcagcacatccatgatgcgctgagtgtttttcggatccagcgaggcgacaggctcgtcggccagcaggatcccggggttttgcatcagcgcccggcagatcgccacccgctgcatctgcccgccggagaggttctccgcccgctgcagcgcgtgcggcagcatgttcatccactcaagcagcgcaatggcgcgcgcccggtcggctgcgggaaagattttaaacagcgatttcagggttgaagtctggctgaggcggcccagcaggacgttggtgagcacgtcgaggcgcggcaccaggcagaagtcctgaaaaatcattccgcagtggctacgccaggcattgagcgcgcggcctttcagctgtgagacatcgtgcggggtaccgacttccgggtagctaagaatttctccgccgctggcgctgtgggtgccgttgaggacatgcaggagcgtcgatttaccggcgccggagcggccaatgaccccgaccatttccccggcgtgcagatcaaagctgatgccgtccagcaccttgtgctgggcttgataagctttactcagattacgcacgcttaagaccttccgctgccggccggcagcgggatcggtgaacggctggaaatcagtttcggccaccgcggcaagagagctgttcataagagtgtccaggttcgtcattaactggccactattaataggtctttatatgaaatttcgatgacggtattgcgaacaaagcgtgaactggcgtgaaagagcgacggccagcggctcaacgcgtgcggcatgctggcggctggcgaagcgccgaaaagccgctatgctttggaggacgcgaggacagaccggttcgtaggcgtagacagccttcggcaatcttcgcttaatcttgatgaagaagactgtttaatcgaatagataatgcgtctgcctttgtttagcattcaacatcccgcatgtattaacatatacataactattttgtgcggcaggttaatctattcatgagtcttatgtgttggtgaatcatcctggtttttctttatttgtagatttatatcctttcttttgtgctaaatccggtttatttgataagccattcaagagttccattaagaatattcctaacataatagggcgaagatcctggataatataaagcgcagataagaattgacggttatattaccaataaccttatgaaaataaatgtctttttctggcgctcaaaaatttgatattttcagtttttgtaaatattgacctgggcgcgaaattcattgcctttccgcatgttgacactccataggaaaaaacttaaattcaacgccaagcagaaaataattatagtttaatccccgcttatccaatattgataagtaatgcgtgtcttatttaatggcgatttattaaaggaaacgaatacgccagtaaactttataggcctggcaagcagtgacgttgtaaaaatgattacttcaaggactatgaggttaaaaactatatggaatataaaagctgttccgataagtatatttggtctgccgatgactcctatttctataaaggactgtccgaactgattgtagacatcgacgaattaatttatctctcactggagaaaatcagaaaagattttgtgtttatcaatctcaatacggcttcattaaacgaatttatcaggcgcgacagcgaatggctatccgcggtaaaggggaaacaggtcgtattgattgcggccaggaaatcagaggccttagcgaactactggtattacaatagcgatattcgcggggtggtatatgttggtctgagtcgcgatattcgaaaagaactggcctatgtaattaatggcaggtttctccgcaaagatattaagaaagataaaattacagatcgggaaatgaaaattatccgcatgaccgcccagggcatgcagccgaaatcgatcgccagaattgaaaattgtagcgtgaagacagtgtatacccatcggcgtaatgctgaggccaaactgtattccaaaatatataagttagttcagtaacacccaggcaattctgttttttaaatggttcaccgggacatcatgtccttaattcaactcaggatgaaaaagcgatgaaaaaaaaggttctggcaatagctctggtaacggcgtttaccggtatgggcgtggcgcaggctgctgacgtaacggctcaggctgtagcgacctggtctgcgaccgctaaaaaagacaccaccagcaagctggttgtgaccccgctcggcagcctggcgttccagtacgccgaaggcattaaaggctttaactcgcagaaaggtctgtttgacgtggcgattgagggggacacaacggcgaccgcctttaagctaacctcgcgtcttatcaccaacaccttaacccagctggatacctccggctccacgctgagcgtgggcgtggattataacggcgccgcggtggaaaaaactggcgataccgtgatgatcgataccgccaacaatattatgggcggcaacctcagcgcgctggctaatggctacaacgccagcggccgtaccaccgcgcaggatggtttcactttctccatcatcagcggcaccaccaacggcaccaccgccgtgaccgattacagcaccctgccggaagggatctggagcggcgacgtcagcgtacagttcgacgccacctggaccagctgatccttctgatgcaccagcagggggatctccccctgcttttttcacggacggaattgttatgaaaaagcaccttctggccctcgggctgctgcttgccggggcgtcgccggcgcaggcgctggatgtcggcgatatttcatcctttatgaacagcggcagcagcacgctgagcaaaacgatcaagaacagcacagacagcggtcgactgatcaatatccatctcgaacggctctcttccccgctggacggcgggcaggttatcccgatggacaaaccggatgaggtgctgcttacccccgccagcctgctgctacccgcccaggccagcgatgtcatccgcttcttctacaaaggcccggcggatgacaaagagcgctactaccgcattgtctggttcgatcaggcgctcagcgatgcccagcgcgataacgctaaacgcagcgcggtggccacggcgtccgcccgcatcggcaccattctggtggtggcgccgcgtcaggtgaactaccgctttcagtacgccaacggctctctgaccaacaccgggaatgcgacattgcggatcctcgcctacggcccctgcctgaaggccgccgacggtaaggagtgtaaagagaattactacctgatgccgggtaaatcgcgccgttttacgcaggtgaatacggcagataaaaaaggacgggttgcgctttggcagggtgagcagtttgttcccgtgaaatagacagttgtgcagatggataacgacgatgcctctacgacggatttccccaggactgaaaacgcggcttgccttcggcatgatatttttgttcgttcagcccgacgccagcgcggctgccccaggcgcgcagcagattggcggggtgattattccgcaggccttcagccaggcgctgcaggacggcatgagcatcccgctctatattcatcttgccggcagccagggcatcaaggacgatcagcggatcggcagcgcctttatctggctggacggcggccagctgcgcgtccggcagatccggctggaggacagtgaaggtaacgccagcgtcagtgaacagacccgtcagcagctgatcggcctggccaacgccccgttcagcgaggcgctcaccattcccctgaccgacagcgcccagctggatcttagcctgcgccagctcctgctgcagctggtggtcaagcgcgaggcgctgggcaccgtgctgcgctcgcgcagcgaagacatcggtcagtccagcgtcaataccctcagcagcaacctgagctataacctcggcgtctataacaaccagatgcgcaatggcgggagcaacacctccagctatctgtcgctgaacaacgttaccgcgctgcgggagcatcacgtggtgctcgacggctcgctgtatgggatcggcagcggccaacaggacagtgaattatataaggccatgtatgagcgcgatttcgccggccaccgttttgccggcggcatgctcgacacctggaacctgcagtccctgggaccgatgaccgccatttcggccggcaagatttacggcctttcctggggaaaccaggccagctccaccgtcttcgacaacagccagtcggccacgccggtgattgcctttttaccggcggcgggcgaggtgcatctcacccgtgacggccggttgctgagcgtccagaacttcgccatgggcaaccatgaagtggatacccgtggcctgccgtacggtatttacgacgtggaagtggaggtgatcgtcaatggtcgggtggtcagcaaacgcacccagcgggtcaataagctgttcagccggggacgcggcgccggcgcgccgctggcgtggcaggtatggggcggcagttttcatatggatcgctggtcagagagcgggaaaaagacccggccggcgaaagagagctggctggcaggcctttcggcctccgggtcgctcagcaccctgagctgggcggctacgggctatggctacgacaaccaggctgtgggggaaacccgcctgacgctaccgctgggcgagtcgatcaacgttaacctgcaaaacatgctggccagcgacagctcgtggagcagcgtcggcagcatcagcgccacgttgcccgggggattcagttcagtgtgggttaaccaggagagaacccgcattggcgatcaattgcggcgcagcgatgccgacaaccgggcgatcggcggcaccctcaacctgaacgcgctgtggtcgaagctggggacgttcagcgtcagctacaacgatgaccgtcgctacaacagccattactacaccgcggattactatcagacggtctacagcggcgcctttggctcgctcggcctgcgggcggggatccagcgctataacaatggcgacagcagcgccaacaccgggaaatatatcgccctcgatctgtcgctgccgctgggcaactggttcagcgccgggatgacccatcagaacggctacaccatggctaacctctcagcgcgcaagcagtttgatgaaggcactattcgcaccatcggcgccaatctgtcgcgagccatctccggcgataccggggatgacaaaaccctcagcggcggcgcgtatgcccagttcgacgcccgctacgccagcggcacgctgaacgtcaacagcgcggcggacggctacgtcaacaccaacctcaccgccagcggcagcgtcggctggcagggcaaaaatatcgccgccagcggacgaaccgacggcaacgctggggtgatcttcaacaccgggctggaggacgatggtcagatcagcgccagggttaacgggcggatcttcccgctcagcggcaagcgtaactacctgccgctctctccctatggtcgctatgaggtggagctgcagaacagcaaaaactcgctcgacagctacgacatcgtcagcgggcgcaagagtcatctgaccctttatccgggcaacgtcgcggtgattgagccagaggtgaagcagatggtcaccgtctccggccgtattcgtgcagaagacggcacgctgctggcgaatgcgcggattaacaaccatatcggccgtacccgcaccgatgaaaacggcgagtttgtcatggacgtggataagaaataccccactatcgatttcagctacggcggcaataaaacctgcgaagtggcgctggagctcagccaggcgcgcggcgccgtctgggtgggggatgtggtctgcagcggcctctcgtcgtgggcggcggtgcagcagtcaggagaagagaatgaaagttaatgcactgatggcgctggcgatcctcgcgctgctctggccggcagccgcgctcagggcggcggtgaccaagaccacctggtcggatgcgccggcgcgcgagtttgtgtttgtggaaaacaactccgacgacaactttttcgtcacccccggcggggcgctggatccgcgtatgaccggcgctaaccgctggaccggcttaaaatacaccggctccgggaccatctatcagcagagtctcggctatatcgataacggctacaacaccgggctcaatgccaactggaagtttgatatgtggctggaaaactcaccggtttcacaccccttaaccggcctgcgctgcatcaactggtacgccgggtgcgatatggctaccagcctgatcctgccgcagaccaccgacgccagcgggttttacggcgcgacggtgaccagcggcggcgcgaagtggatgcacggcatgatgtcagacgccttctatcaatatctgcagcagatgccggtcggcggcagctttacgatgaccatcaatgcctgtcagacctcggtgaactacgatgccagcagcggcgcgcgctgtaaggatcaggcctccggtaactggtatgtgcgcaacgtcacccacaccaaagccgcgaacctgcggttgattaatacccactcgctggcggaggtgtttatcaacagcgatggcgtgccgaccctcggggaagggaacgccgactgccggacgcagaccatcggcagccgctcaggattaagctgtaagatggtcaactataccttgcagaccaacggcttaagcaacacctcgatccatattttcccggcgatcgccaactcgtcgctggcctcggccgtcggggcgtacgatatgcagttcagcctcaacggcagctcctggaagccggtgagcaataccgcttattactacactttcaacgagatgaagagctcagactcgatctatgttttcttctccagcaacttctttaagcagatggtgaacctcgggatcagcgatatcaacaccaaggatctgttcaactttcgctttcagaacaccacctcgccggagtcaggctggtatgagttttccacctccaacacgctgattatcaagcctcgtgatttcagcatcagcattatctccgacgaatatacctcggcgccgtcgcgcgaggggtatgtcggcagcggcgaaccggcgctcgatttcggctacatcgtcaccaccagcggtaaaacggccgccgatgaagtgctgatcaaggtgaccggaccggcgcaggtgattggcgggcgttcctactgtctcttcagctccgatgacggtacggcgaaagtgccgttcccggcgacgctctcttttatcacccgcagcggcacgactcagacctacgatgccgggtgcgatgacagctggcgggatatgaccgatgcgctgtggctgaccacgccgtggaccgatatctccggcgaagtggggcagatggataagaccacggtgaaattttcgattccgatggataacgccatttcgctgcggacggtagacgataacggctggtttggcgaagtcagcgcttcaggagagattcatgtccaggcgacgtggcgcaacattaactaaggccctgctgacggtgggctgcctgctggcagcgccgctggcgcaggcgatctcggtcggtaacctgaccttttccctgcctgccgaagcggatttcgccagcaaacgggtggtcaacaacaataaaagcgcgcggctgtaccgcatcgccgtcagcgccatcgatcgcccgggcggcagcgaagtccgctcccggccggtggatggcgaactgctgttcgccccccgccagctggtgctgcaggcaggtgagagcgagtattttaaattttactatcatgggccgcgggataaccgcgagcgctactatcgggtctcgtttcgcgaaatccccacccgcaacctgacgaggcgcagcccgactggcggcgaggtcagcatggagccggtggtggtgatggataccattctggtggtgcgcccgcgcgaggtacagtttaaatggtctttcgataaggtggccgggacggtgagcaacaccggcaatacctggtttaagctgctgattaagcccggatgcgattcgaccgaagaggagggggacgcgtggtatctgcgtcccggggacgtggttcgccagccggcgctgcgccagccggggaaccactatctggtctataacgacaaatttattaagatcagcgatacctgtccgctgaagccccgtcccgcggagtgagccttatctggtggtcgcgcggcgggtaaagcgccggctggccagcaggctcagaccgcagcacagcaggtagtacaccgcgccggtgaagacgaagatcgccaggggatagatctgcacccggttgttgacctggccggccacggtggtcagctccgggacgttgacgataaacgccagcgaagtgtccttcagcaggccgataaagatccccaccagcgacggctgaacgttgcgcagcgcctgcgggagcagcaccaggcgcagcgtttgcccgggagcgaacccctgggtcagcgccgcctcatactgtcctttcggcagcgactgcagcccggccagcaccgagtgcatcaccgaggcggcggtaaaccacgccagcgccagggtcacggtcaccgcgccgggcagatcgccgccggtcagcatcggcagcagataccacagccagaagatgacaaatatcagcgggatgccgcggataatttccacccacagaaacagcagacgccgcaccagcccgccgtagcgccaggccaggcccgccagcgcaatgcctcccggcagcgccagcagggtggcgccgatggccatcagcagggtcagcgccacgccgccgggctggccctccgccagtcggccccacagcaggtaatcgaggttatcggcgatcaccgccagattagcgttcatgtcgggcgctccgttgcagttttcttcccgggccgagacgcgtgagcgccacgcccatcgccacccccagcgccaggtacagcgcggtgccgacggcaaacgcctccagggcgtgcgcgttatagctctcaatctgccgcacctgataggtcagttccgcaaagccgatgccgctggccagcgatgagagtttcatcaggttaagatactggccgacaatcggctgccaggcgttgcccagcccctgcggcaggaggataaagcgcagctcctgccacggcgtaaagccctgcgacagcgcggcttcccgctgcccgtggctgacggcgcgcagtccggaggcgatctcttccaccagaaaggcggaggtaaagacccccagcccccacatcgagcagaggaactccggcgtcagccaccagacgttacccggcaaaatggaccaggcgtgttcgtcgttcaccacctccttcaccgccagcggcagcaggttccaggcggcaaagtaccagaacagcagctggaccagcagcggagtgttgcgaaacaacgagacccacgcggccaccagtccgcgccccgcgcgtccgccgccgaggcgcagggccagcagcaggaccgccagcagggtggcgagcaggatcccggcgacgctgacccagatggtggtgagaaaaccagagataatccattgcaacggctgcccgctcaggacgccgtgccagtcaagcatcggcgtcactcgaggctctcctggtgcagcggatccagcaccttctgcagaaaacgccgcgcgcgggcatgctgcggatgggcgaaaaactcagccggcggggcgacttcgaggatgtcgccgccgtcgataaacaccacccggtcggcaatttcgcgggcaaactgcatttcgtgggtcaccaccagcatggtgatcccgctgtgggcgagggttttcatcacctgcagcacttcgccgatcatctccgggtcgagcgccgaggtgggctcatcgaacaggataatctgcggcgatgaggccagggcgcgggcgatggccacccgctgctgctggccgccggagagctgcgccggcatctgctgcgctttttcttccagtccgacctgacgcagcagcgccagcgcccgcgcctgagccgcgcttttttcccagccatgaacgcgctccagcgccagagtgatgttctcctgcgccgtcaggtgggcataaaggttgaactgctggaagacaaagccgacgcggctgcgcagctggcgcaaggcgctgccgctcagccggctggtgggtttgccgtcgatcaggatctcgccgccgcttaaggattcgagctggttgatcaagcggatcagcgtcgattttcccgaaccggaagggccgaggatcgccaccacttcgccgggctcgacctgcaggttgatggcgttaagtacctgatgatcgccgtagcgcttggccacatcacggaacgtaatgctggcgcgctgcagacgtgaaaaatccgcggccggagccgcggagtgggagagtaaacccgagaacatattatttcgcttctatggtaaaggcgcgcggctgcggcgttttggtggcagggccaaaccagacatcgtaaattttcgcggcttcgccggttttctccagcttcaccagctcatcgttgacggccttcagcagggccggttcgcctttcttcacgcccacgccaatctcttctttgctgagcaggtcgggcagaattttaaacttggctttatccggcgcttccgccagcagaccggcgaggatggtgctgtcctgggtgatggcctggacgttgccgttgcgcagggcggtcagggccagcggaatatcgtcataggagaggacgcgagcctgcgggaaacgctggtgcagggcctgttcgccggtggtgcctttcaccgcgccgatgcgcgctttgctgtactcatcgagcttatccggagagccggccggcacgaggaactgctggccggtgacgaaatacggcgttgagaaatcaataacctgggcccgctccggggtgatggtaatgtcggcgacgatcaggtcggctttaccggactgcagcagcggaatacggttggccgggttggtggccaccagctcgagtttgacgccgagcgctttcgccagcgcctgggcaaagtcgacgtcgtagccgacgatatggtgggttttggcgtccacggagccgaacggcgggttggcgtcgaaggtggcgacttttacgacgccggcggctttgatgtcagccagctggtccgcctgtgcctgcgaggcgagcagcagcatacccagcgccagtgcgatttttgtggttttattgcgcatagtttttcccctgaatccctgttttgttttgtggacatcacgctcccacaaattgcccgtcggcggcaaagaagaaaaaattcttatctataaccaaaaagaacttaacaaacctatgggtattctttatgcgccgctggcttttaccaggacggcaacgactgccgggcggtcccctctccctcagggagagggccagggagagggtgataggaccgggggtaatatgcgccagccaggattgcaaattcggaattaatatttcccgcgcccggccaactgtggttgaaatagacccaggcgattcgcttcccgacagaggagaaaacgaaagtggcattgtggcaacggttaacgggctggctggcttttttgtccaacggtgaagccggacagcaggatacccagcgcgtcatggaggcgatcctgccggtagccagcctctacggcgtggacattggcaacgtggaaacccggtggttccgtcatgataagacatactgagcgacgcaggacgcgagaagcctactggaacgaggtgtgctttgtgtagcaagagactgcctgaggttgcggccttgcaggaggcgccgccgcagcccaggcagttttgaccatgcctatccccccagatacatccgcttaatttccggattagtcagcatctcccgcgccgcgcctgacaaggtgatccggccattctccaggacatacgcccgatcggcgatcgccagcgcggccgtcgcattctgctccaccagcagcaccgtcatattctcttcgcgcagttgcttaatgatgccgaacagctcgccgacaattttcggcgccagcccgaggctcggttcatccagcatcaataacaccggctcgctcatcagcgcccgggcgatggccagcatctgctgctcgccgccgctcatggtgcccgccatctgatggcgccgctccttgagccgcggaaagagggcgtacatgcgatcgcgcaggcgggcgtagccggcgagattattgtaagcgcccatgcgcaggttctcttcgatggtcaggttggtaaagacgcgccgtccctccggcaccagcgccagcccgcgacgcacgatctggtgggtctggctgcgtgagatatcgtcgttgaggaagctgacgcgcccactggagcgcaccaggttgacgatcccgttcagggtggaggttttaccggcgccattgctgccgatcagggtgacgatttcccggtcatagacatcgatatcgacgcccttcagaccctggatcacgccgtaaaagaccttcagttcccgggcgttaagcataattggcttctcccagataagcggaaatgacgtccggatgctggatcgcctcggccatcaggccgctgaacagcggcttaccgtactccagaaccatcacccgctcgcacaggcggttgacgaagggcatatcgtgctcgattaacaggacgctgagctgatagtcatggcgcatgcggaagatcagctccgccagatcctcggtctccttcgggttcatcccggcggccggctcatcgagcaggagcagcttcggcgcggtggccagcgcgcgggcgatctccactttgcgctggttgccatagcttaggtttgtggcctgcatatgggcgaagtgggcgatgccgatatcctccaggatggccatcgctttggctttcgccgcccgctcggccggaaagtagcgaccaatatgcagggccgcctccagcagcgagtagcggctggcgcggtcgagcccgaccatcacgttctccagcaccgtcatggagttaaacaggcggatattctggaaggtgcgggcgatcccggcgttcaccacctggttgggcttcagccccttcagcgacgtgcccgccagggtgacgctgccgctggtgggtttatagttggcggtaatgacgttaaacagggttgttttgcccgcgccgttagggccgataaggccaaagatctccgcctcgtcaacatggaagctgacgttgtcgatggcccgcaggccgccgaactgcatggtgacgtcctgcacctgcaggataacgttattttccgccatagccgccgctccttcttccggtctgccaaatctcttttttccccaacagcccctcgcgggcgaagagcatgatgatcagcaacagcagggagaagaccaccattcgcaggcccgggtacgcgccgagatcgtgaccgaagaactgcagcggctgatcgaggaagcgcagccactcgccgctgccgaccaccagcacggtgccgagcagggcgccggtggtgctgccgagcccgccgaggacgataataatcagcagctggaaggtgagcataaagtcgaacagccccggggaaatggtggtcagcagggaagccagcagaccgccgccgatcccttcgaagaaggcgctggtggcgaaggcgcaggttttaatgcggaaggtgttgacccccatggcgatcgccgcatcttcatcgtcgcgaatagctttcatcatccggccatacttcgaccacaccagctggaggatcatgccggtggccagcagggcgaacagcccgcaccagaacaggagatgcggctgctgcggaatatcgttcagcccgatggcgccgttggtgatttgcgggttgttaatggcgaggatcttgatgataaacccaaagccgagggtgacaatggccaggtagtcgccacgtacccggaagaccggcacggcgaggcacaccgccagcgccgccgcgcacaggccgcttatcagcagggcagggaggaagcccgcgtgcaggctgaggatccacgggctgggggcggccatttcaaacatgtctaccttgctgtcgctggagaggatcagcagggcggtcacgtaggcgcccaccgccacgaagccgttcggctccagcgacagctggccggtcacgccgttgatcaggttgtagctgaccgcgaggatcataaagataaaaatggtgctgatgacacgaacaatgtagtcattgaaaaccacgttgattccggccagcagcgcgatacagatgacaataatggccaggttgcgcagctgcgccccggcggtcgtcgtcgcgttgagcatcagaaacggctcctttccagacgttcgtcgcccataatgccgaccgggcggaacaagaggaccagaatcaagaacaggaaggcgaaagcgtctttatagccgcccagttcggggaagatcgccacggcgaccacctcggtaaaaccgaggataaagccgcccagcaccgcgccggtgacgctgccgatcccgcccagcacggcggcggcgaaggccttcaggccgataagcacgcccatcaggggatcgatcgtcgggtagctgatggagtagaacacgccgccgagcgccgcgagactactgccgagggcgaagaccagggagatgatccggttggcgtcaatgcccatcaggcgcacggtgttgacgtcaaaggccaccgcgcggatcgccatcccatagcgggtgcggtacagcagccagaggatcgccagcagcagcaggacggtgatcagcggcacaatccacgccacgttggtaatgatgacgctgccgaaggcccgggtctggttgaaaaagtcaggggcggagaagaagcgcgagctgccgccaaacagtacgttaaacaggttttcgagaaagaagctgacgccgatggcggtgatcagcatggagattttcgaggcctgacgcagcggacgataggcgacccggtcaatcagcataccaaacaggccgcacagcccgagggtcaggaaaacggctaccccgaagggtagcccaaccgaagaaaataaaaacagcgtactaaacgcgccgaccatcatcacgtccgcatgggcgaagttgatcagccgcagcacgccataaaccatcgtataaccgatggcaatcagggcgtacatgcccccaagactcattccattgaccacttgctggagaaaaatggcgccgtccattttgtagcctcgtcacaacttaagggttaaccacggtacgaaacgccagcttgccatctttcacttcgttgatgaccgcgctgcgaatggcgtcgccgttctgtaacgtcagcgtgccggtcaccccctggaaatctttggtggcgcggattttttcatttacgcagacccgatcgtggggatcgctgcactggttcatggcgttgacgatgacgttataggcgtccgccgccattgcgccccaggtatgggtcggctgctggtatttggcttcccaggctttgatgaaggtttcccccgccggggtctgctctttggcgttcggcgagtagtaatcggtggtcatatagccgttgaccgcgtctttaccgacatcgaagaagacctgatccgcggccagaccgtcgccgcccaccaccggtttgttgagccccagctgtttagactgcacggcaatcagcgccccttcggtgtagtagatcggcatgtaaatcatgtcgacattcttcgccttgacgctcgccagctgggctttaaagtccttgctgccgcccggggcctggacctcgatgggaatggtgccgccgtttttcaggaactgggtgcggaacgctttcgccaggccgacggagtagtcgttgctgctgtcaaacacgatggcggcggttttggctttcagatcgcgggaggccagattggccccgaccaccccctggaagctgtccgagaagcagacccggctgacgtagggatggttgcgggtgacgcggtcgttggtggcggtggaggagaccagcggcgttttgctgtcgtcggcgattttggtcatcgccagggtgttggaggaggtgacttccccgatcacggcatccactttatcgctggagaccaggcgctgcatggcattggccgcttcgactttgtcgcttttatcatcgataacgataagcttgatggtatcgccattttttaacgttggggtgatggcctgaataatgtccagccctttctgcgacggctggccatagccgctgagggcgccgctcaggggtaataccaccccgattttaatttccgctgcctgcgcgctgctggcgccgaccagcgcggcaaccagcgtggccattaaagacgctttcccggaaaacgatttcattggtatttctccgtcggtcgattatttatctttaaccatcaatgactgcataacattaaggaataatgcgccagcgtatccggcgaattattggctgttatgttgaatagataacgagatatataccctaaataattcgagtcgcatgaaggcggcaagtaagcgagtcgccagacgcttacagaagtaagtgactgggggagagaacgcagccaacgcacatgcaacttgaagtatgacgggtatttttaatgcgctgatttaccttacaacgtccgtttcgtttttactcatgcaatattcttattacctgcagggaagggcataaggctggcgacaacacggtttttggtacggtgaaagcattttgccggggggcgactggcgccttacccggcctgaaaaatacgccatataaaccgctggcacggcttccgtagacccgtaccagcgaagcgccgccgggcaatttcagcacgcggcggaatataaagtcaggtgcacaagataatattaaaaatctattctgctgctcgcgtgacttattattttaaagggggcaacggttttattttaccatgcagcgccggattatcgctttcatctttcagacccaccccggtaagccggcgcaaaaaagcctgctccagcagccaggccagtttaaaggcggcggcgtcatggcttaatccctccggccgaatattggagatacagttgcgctcagactccaggcgctgacgatgaggctgccaggtgaggtagacgccgaggctgtccggcgaggagagacccggtcgttcgccaatcaggatcgccaccgcgcgggctttcagggtttcgccaatatcatctcccagcgctacccgcgactgatgcgccagcaccaccggcgccaggccgatacccagcgtctgcagatagggcagcagggcgcggatcaacggcaccgcctggcgctctaccgcccaggaagagaggccgtcgccgatcaccagcagcaggtcggcggggcggacgccgctggcggcgaggtcggcgcgactctcgtcggcgagccgccgcccgagatccgggcgccgcagataggtatgacggtccggcgcggcgctgtgcaccgtcagggcgtcgaggccgagcgccgccagcggcgccaccaattgttggctggcgaacggctgatgaatggcatcccgcgctctggcatgggccagaccaaagttgaggacttcgcgggtcggcagactggcgccgctgcgccccagggcgatccgcgcatcggtaaattcacgcagcgggttccaggcatcgggacggttcatacagaggctccttgcggcaggacggacagcagcggatggcgggcgtcggtgagccgcagcgcgccgtgcggatcgataatttgcattttcgccagccagtcggcgaactccggggcatgctttaagcccagcaggcgacgggcgtacagcgcgtcatggaacgaggtgctctggtaattgagcatgatatcgtccgctccgggcacaccgatcaggaaggtgagcccggcggcgcacagcaaggtcagcagggtgtccatatcatcctgatccgcttccgcgtggttggtatagcagacgtcgcagccgatcggcaggcccatcagcttgccgcaaaaatgatcctccagcccggcgcgaataatctgcttgccgtcgtagagatactccggaccgataaaaccgaccacggtattgaccagtagcggttcaaagtggcgggcgacggcgtaggcccgcgcctcacaggtttgctgatcgacgccgtggtgggcgttggccgacaggcagctcccctggccggtctcaaaatacatcacattgttgccgagggtaccgcgcctgaggctcagggccgcctcgcgggcctcctgcagcatggcaaggttgatgccgaagccgctgttggccgcttcggttcccgccaccgactgaaacaccagatccaccggcgcgccgcgctcaatcagctgcagcgtattggtcacatgggtcagaatgcaggactgggtagggatggcgaagcgctgaataatatcgtccagcatgacgttcagctgcgccagcaccggtaagctgtcgctggccgggttgatgccgatcaccgcgtccccggcgccgtacagcagcccgtcgagcatactggcggcgatgcctttcaggtcgtcggtgggatggttgggctgcaggcgtacgctgaggtggccgggcaggccgatggtgttgcgaaagcgcgtcaccacctggcatttgctggcggcaaggatcagatcctgattgcgcatcagcttactgaccgccgccgccatctccggggtgatggcgcgggcgacccgctgcagcgtggcggtatcggtagcatcatccagcagccagtcgcgaaaatcgccgaccgtcaggtgacgcagggcggcaaagccctgcgcatcatgggtgtcgaggatcaggcgagtcacttcgtcctgctcgtaagggataagcgggttgtcgagaatgtcggtcagcggcacctcggcgagggccattttcgccgccatccgctcttcggctgaggtggcgataacccctgcgagggcgtcgccggaacgggccggcgacgctttcgccatcagcgttttcagactatcaaagcgccatacctggcccgatagcgtggttttatacatgccgcctcctcaggagaccgtgcgcagttgaggatccactggcgcccgttcacgggccgctgcggttttgcggaaccacaggtagccgccgagcatcatcgccgcgaaaatcagcgccagcagcaggttataccagaccatcgccaccaggcagagcaccgccatgccgagggcaaaggccggcgccagcgggtagagcggggcgcggaacggacggatcagcttcggctcgctacggcgcagtttgaacagcgccgccatggaagtgatatacataacaatagccccaaataccgacatggtgacgatgcaggcggtcagcggcatgccgctgatggtgatcagcgagtcggagaagatcgcggcgatcccgaccacgcccccggcgaggatcgccatatgcggggtgcgggtgcggcggttgagggaggccagcccggcgggcagatagccggcgcgggcgagggagtagatctgccgcgagtagcccataatgatgccgtggaaggaggcgacgaggccaaacagccccagccacaccagcatatgcagccagccgctgccgttgcccacgaccgtcttcatcgcctggggcagcggatcgttaatattggacagcgcgcgccagtcgccgacgccgccggcgaagaccatcacgccgatcgccagcaccgtcagcgtcagaatgccgccgcccagggcgcggggaatggtgcgctgcggatctttggcctcttcggccgccatggaggccccctcaatggcgaggaagaaccagatggcgaacggaatggcggcgaacatccccggcagcgccaggccgctgaagctgtccgcgcccgcccagccgttagtggtgaagtggctccaggagaagccgggggcgaccacgcccatgaacaccagcagctcgaagatggccagcagagtgacgatcagctcgaaggtggcggcgatgccgacgccgagaatattgagcgtcataaagatcacgtaggcgccgcaggcgacccatttcggatccagcgccggaaactgcacgttgaggtaggccccgatggccatggcgatggccggcggggcgaagacgaattcaatcagggtggcaaaaccagcgataaagccgccggtgggcccgaaggcgcggtaggcataggcgaaagggccgccagcgtgcgggatggcggtggtcagctcggtaaagctgaaaataaaggcgcagtacatggcggcgaccgccagggcgacgaccataaaccccatcgtgcccgcctgcgaccagccgtagctccagccgaagtactccccggatatcaccagtccgacggcgatcccccataaacgaaaactgccgagcgttctttttaaggtggtggtttgctctgtcatacgtattgcctcgccagatagaaaggtgctgaacgacaggctgcaaagagagtgccagaacgttgcctgccgcgataaggcgtcagtccgtggcgcgcccgctggcgctgcgcaaaaatggggcaggctgcacgctgtcggcgcgcgcgctggtgcagcggctttgctttttcagcggcggcacggtataacacttcttcttttggatgtttagatgtctatacgtttatacgcatcatgacccgggcaagcgggctggcgtgagaaaataaaatgcaaagcacaacacaacaacaaggtgggcagctgaagcgcaccatgaaaacgcgccatctgatcatgctgtcgctcggcggcgtgattggcaccggcttattcttcaataccggctatatcatctccaccaccggcgcggccgggacgctgctggcgtatctgattggcgccctggtggtctggctggtgatgcagtgccttggcgaactgtcggtggcgatgcctgagaccggcgccttccacgtttacgcggcgcgctatcttggcccggcgacgggctataccgtggcgtggctctactggctaacgtggacggtggcgctggggtcgagcttcaccgcggcgggattctgcatgcagtactggttcccgcaggtgccggtctggatctggtgcgtggtgttctgcgcagtgatcttcggccttaacatcatttcgacgcgcttcttcgccgaaggcgagttctggttctcgctggtgaaagtgatcaccatcgtcgcgtttattattctcggcggcgcggccattttcggcatcattccgatgcaggatggctcgccggcgccgggcctgcgcaatatcaccgccgaaggctggttcccgcacggcggcctgccgatcctgatgaccatggtggcggtgaacttcgccttctccgggacggagcttatcggcattgccgccggagagacggaaaacccgcataaagttattccggttgccatccgcaccaccatcgcccggctgattattttctttatcggcaccgtgtttgtgctggcggcgctgatcccgatgcagcaggcgggagtggagaaaagccccttcgtgctggtgtttgagaaggtgggcatcccttatgcggcggacatgttcaacttcgtgatcctgacggcgatcctgtcggcggctaactccggcctgtacgcttccgggcggatgctgtggtcgctgtcgaacgagaagacgctgccggcctgctttgccaaagtcaataaacggggcgtgccggtgaccgccctgtcggtgagtatgctgggcggcgtgctggcgctgttctccagcgtggtggcgccagatacggtgtttgtcgcgctgtcggcgatctccggttttgcggtggtggcggtgtggttgagcatctgcgcctcgcactttatgttccgccgccgccatctgcagcagggtaaggcgctgagcgatctccagtatcgcgctccctggtatccggtggtgcccgttctgggctttgtgctgtgcctggtggcctgcgtgggcctcgcttttgacccgagccagagaattgcgctgtggtgcgggatcccctttgtggccctgtgctatggtgcctggtatcttactcgttcacggaatatgactcaggagccccaacatgtcgcagactaatccgtttaccgccctgcttgccgcccagcctttcgtgctgctggacggcgccatggccaccgagctggaggcccgcggctgcgatctggccgacagcctgtggtcggcgaaagtgctgctggagaacccgcagctgatccgcgatgtgcatcttgactactttcgcgccggggcgcaggtggcgatcaccgccagctatcaggccactccggcgggctttgccgcgcgcgggctggatgaggcgcagtcccgggcgctaatcggcaaaagcgtcgagctggcgcgcaaagcgcgcgaggcgtacctcgccgagaacccgcaggccggtacgctgctggtggccggttcggtggggccgtatggcgcgtttctcgccgacggctcggagtatcgcggcgattatcagcgcagcgcggcagagttccaggccttccaccgcccgcgcgtcgaagcgctgctggatgccggcgccgacctgctggcctgtgaaaccctgccgtcattcgctgagatccaggccctggcggccctgctgcaggagtatccccgcgcccgcgcctggtactccttcacgctgcgcgacgccgaacatctcagcgacggcacgccgctgcgcgaggtgatggccgccctggcggataacccgcaggtggtggcggtggggatcaactgtatcgcgctggaaaatacgcccgcggcgctggcgcatttgcacagcctgacggccctgccgctggtggtctatcctaactccggcgaacattatgatgcggtgagcaagacctggcaccatcatggcgaagcctgcgccagcctggcggattatctgccgcagtggctggcggccggggcgaagctgatcggcggctgctgccgcaccacgccgaaggacatcgccgcgcttaacgcgaagcgctaagttttttgccgggtggcgctgcgcttacccggcctacatattgcgcgaaacggatgctgggtaaggcgtagccgccgcccggcgccaaccatctgccactaactcaccgcacaaaaccaactatcctttcccgcttttgttctaaaaacgattcgctattagccagaatttttaattacttcatctccatcctgatgccggaaatactgcacctataacaactcaggggaagcagacattatggcattcacatcgcgaattactcttctggcggcgctggctgtcgccgccttccaggcgcaggcggtcaacgttaccgtggcgtatcaaacctccgctgagccggcgaaagtcgcccaggcggacaacaccttcgccaaaaccagcggggcgaccgtcgactggcggaaatttgacagcggcgccagcgtggtacgcgccctggcctccggcgatgtgcagatcggtaatattggctccagcccgttggcggtggccgccagccagcaggtgccgattgaagtgttcctgcttgcctcaaagctcggcaactccgaagcgctggtggtgaagaaaagcattaccaaaccggaagatctgatcggcaagcgcatcgccgtgccgtttatctccaccacccactacagcctgctgtcggcgctcaaacactggggcatcaagccgggccaggtacagattattaacctgcagccgccggcgattatcgccgcctggcagcgcggggatatcgatggcgcttacgtctgggcgccagcggttaacgaactggaaaaagagggcaaggtgctgaccgattcttctcaggttggggagtggggcgcgccgacccttgacgtctgggtggtccgtaaggacttcgccgagcagcatccggagatcgtcaaagcgtttgctaaaagcgccatcgacgcccagcagccctacatcgccaacccggaggcatggctgaaacagccggacaacatcagcaagctggcgcgcctgagcggcgtgccggaagccgatgtccccggtctggtgaagggcaatacctatctcaccgccgctgagcaggcgcaggcgctgaacgggccggtcaatcaggccatcgtcgataccgcgcgcttcctgaaagagcagggcaaagtgcctgcggcgggaaccgattatcgtcagtacgttactgaccgctttgtgaagtaaaggaggcggcgatgctgcaaatctcgcatctttccgccgactacggcggtaaaccggcgctggcggatatcaacctgacgctggagagtggggagctgttggtggtgctggggccttcgggctgcggtaaaactaccctgctgaacctgattgccggattcgtgccctatcagcacggcagcatcaccctcgaaggtcagcgggtggccgggccgggcgcagagcgcggggtggtcttccagaacgaaggtctgctgccgtggcgcaatgtgcaggataacgtggcgctgggcctccagctggcgggcgtggataaagcgcagcgccggcaagcggcggcgcagatgctgaagaaggtggggctcgaaggggcggaaaagcgctttatctggcaactgtccggcggtcaacgccagcgggtgggcatcgcccgggcgctggcggcgaatccgcagctgttgctgctggatgagcccttcggcgcgcttgacgcctttacccgcgagcagatgcagacgctgctgctgaaactgtggcatgagaccggcaaacaggtgctgctgatcacccatgatattgaagaggccatcttcatggcgaccgagctggtgctgctgtcgccggggccgggacgggtggtggagaggctgccgcttgatttcagccgtcgctttgtcgcgggcgaatcctgccgcagcatcaaatccgacccgcgctttattgaacagcgggaatacattctgagccgggtgtttgaccaacgggaggctttctcatgagcgtggtactgaacgacaaaccgcgtcagtcgacgctgaagtggcgctggccgctctcccgtgagctcaccctcagcgtggcgaccctggcggtgctgctggccgtctggtgggcggtcgcggcgttgcagctgattagcccgctgtttctgccgccgccgggccaggtgctgcagaagcttatcaccatcgccgggccgcagggctttatggatgcgacgctctggcagcacctggcggcgagcctgacgcggatcgttatcgccctgttggcggcagtgcttattggcgtaccggtggggatcgccatggggctcaactcgacggtgcgcgggatcctcgacccgctgatcgaactctatcgtccggtgccgccgctggcctacttaccgctgatggtgatctggtttggcatcggtgaaacctcgaagatcctgctgatctacctggcgattttcgcgccggtagccatgtcggcgctggcaggggtaaaaagcgcgcagcaggtgcggattcgcgctgcccgttcgcttggcgccagccgggcgcaggtgctgtggctggtgatcctgcccggcgcgctgccggagatcctcaccggactgcgcattggtctcggggtgggctggtcaacgctggtggccgctgagctgatcgccgccacccgcggattaggatttatggtgcagtctgccggcgagtttctcgccaccgatgtggtgctggcggggatcgcggtgattgccattatcgcctttttactggaactgggtctgcgcgcgctgcagcggcgcctgacgccctggcatggagaagtacaatgagtgaacgtctgagcattaccccgctggggccgtatattggcgcgcaggtgagcggggcggatttaacccgtccgctgagcgacaaccagtttgaacagctgtatcacgcggtgctgcgtcatcaggtggtattcctgcgcgagcagaatatcaccccggcgcaacagcgcgacctggcgctgcggtttggcgacctgcatatccatccggtctaccctcatgccccaggtgtggaggagattatcgtcctcgatacccacaacgataatccgccggataatgacaactggcataccgatgtcacctttatcgacacgccgcccgccggcgccattctggcggcgaaagagctgccgatgaccggcggggacaccctgtggaccagcggcatcgccgcctgggaagcgctgtcagaacctttccggcagctgctgagcggcctgcatgccgaacacgatttccgcaaatcgttccaggagtataagtacaacaagaccgaagccgagcatcggcgctggcaggaagcggtggcgaagcatccgccgctgctgcatccggtagtacgtacccacccggtgaccggcaagcaggcgctgttcgttaatgaaggctttaccacgcgaattgtcgaggtgagtgagaaagagagcgcagcgctgctgaacttcctgtttgctcatgtcactaaaccggagtttcaggtgcgctggcgctggcagccgaacgatgtcgctatctgggataaccgggtgacccagcattacgccaacgccgactatctgccgcagcggcggatcatgcaccgggcgacgatcctcggcgataagccgtattaccgggcggggtaaggcttgtagccggttaaggcatcagccgcgagccgcggagaacattgcccgctgctttccggaggcgtcgcctgacgcgccttttccgggctaccgatccgtcggaaacggtagcccggctaaggcgcaacgcgccgcaagccgggaaaaagcgtttatgccgatttttgcgcacccagatgcgcgccaatatagcgctgatagcggttcgctttcagataggtcaaatccaccagcaccagaccatccacgcagttattgaaatccgggtcgctgccgaaatcgataaactgcacgccgcccggctcgcacacttccgagtactgcttatacagcggggggatcgcgcagccgaggttgccgagcagggacttcagccgggccaggtcgtcgttgtaatcctccccgccaaactgcgccagcacgtcgggcagcgacgccggataaggtcgacgcgactccgccagcggatgcgtcgccgggaaccacagccggtagaatgccaccagcagatcgcgggcggcgggcggcaatccgccagaaatcgacaccggaccaaacagatagcgatagtgcggatagcgcgccagataagcgccgatgccggaccacaggtagtccagcccgcgacgcccccagtagcgcggctggataaagctgcgccccagttcaatgccgtgctgcaggacatcgtccatccgcccgtcgtaatggaacagactgtaactgtagatcccctccaggccgcgctttgccagctggatggccgtcggcataaagcggtaagcgccgacgatctcgaggtcttcttcatcccacaggatcagatgcagatagtcgtcgtcatacccgtcgatatcccgccgtttgccgctgccttccccgaccgcgcggaaggcgatttcccgcaggcgtcccagctcgcgcagcagcggcgcgtcctcctggccgttgcgctgccagaggtaaatcgctttgccatcggcggtgcggcccaggcattcggccttgtgcagttcgcgtttgagcagcgcccggtcttccggacgggcgatagcgctttcggttttaaaccgccccggcagccctttgcgcagctgttcaaggtgctgatagcagcggccggtaagctcgcgagcgctggactgcgcatcgaaccagttcgaccaggggatctgctggccgatacgcaccggcaggctgctgttgcgccggcgaaacatctgctgcatcagcaggagcagcggcaggttgtctgatatcagcgtgctggcgtaaaacagggcgctgttgcgggcgttaatccacgccggcagcagcggggcacggtattttgccgccagcttaataaagccggagtgccattttttatcgcggatgccgcgacgggtgaggcgggagacttcccccgccgggaagaagatcagcaccccgccggcctgcagctgctggtccatctgctgcagcgccgctttagcggtgcggccatgaatattatctaccgggataaacagcgagctcaggggctcaaggtgggtgagcatgcggttggtgaccactttgacatcgcggcgcacgcgggataccgcatacaggagcgccaggccgtcgagggtgccggtggggtggttggcgataatgaccagcgggccatattcggggatttgttcgagatcgtgcgccgggatggcgcagcggatattgaggtattccagcacctgttcgaccgtatcaagccccttcaggtggcggtgacggtcggcaaattgttgaaactcttcctcataaaatagcttttttaacagtttcttttgccagggggcgggcctcgcctgaggccacaggtcatcgagtacgttgtcgagactaaacatagtggctcctcctccgtcctgcccagacagtagaaggtggagatgtcgttcagattacagttgggtgaagtttcggtcgcagcgggggagacgacgggtagggagccgtttttgtgccgggtggcggctgtgcctgacccggcctacatgcgggatgggactgcgggcccggcaatctcgtaggcccgcgcaagcgtcagcgccgccgggcaatggctacgagtagggagccgtttttgtgccgggtggcgactgcgcctgacctggcctacattcgtgataggcctgcgggccccggtaagcgcagcgccaccggggaggggcgggtttaacggaggatctttttctcggccagatcgagggcgaaatagctgaagatcaggtcggcgcctgcgcgtttgatagcgccgaggctttccagaaccactttctcttcatcgatagcgcccgcctgggcagcaaatttgatcatcgcgtactccccgctgacctgataggcgccgagcggcagatcgctgcgttcgcggatatcgcgcagaatatccaggtaggcgccagccggtttcaccatcaggcagtcggcgccctgggcttcatcgagcagcgactcgcgaatggcctcccggcggttcatcgggctcatctgataggttttccgatcgcccttcagcgcggtaccggccgcttcgcggaacggaccgtagaaggaagaagcgaacttggtcgagtaggacatgatcgccgtattggtgaagccggcggcgtccagcgagcggcgaatcgcctgcacctgtccgtccatcgcggcggaaggagcgatgaaatccgcccccgcggcggcggcgacaacggcctgtttgccgaggttttccagggtcgcgtcgttatccaccccgtggtcgcacagcacgccgcagtggccgtgggaggtatattcgcagaagcaggtatcggacatgacgatcatctccggcaccgtggacttacaaatccgcgacatacgcgccaccagaccattttcattccaggtatcgctgccggtggcatcggtgtgatgagaaataccaaaggtcatcaccgagcggatcccggcgttggcgatgcgttcgatctcgcgcgccagatatttttccggaatgcgcatcacgccgggcatggcctcgatcgctttgtaatcatcaatttcttcttcaacaaagatcggcaacaccaggtcgttcaaactcagtgttgtctcttcaaacagggcgcgcagcgcagcggattgacgcaggcggcgggggcgagtgattaaatctgtcatggtttgcctgattttgtgaaatgaaagacgatagtgtaactgaaatggcagcgggatgtttcgccaaaacgatcgttatggcgcatcggcgaaaccttccccgggcttactggctggccgtctgcatgttgggctgtgcgccgctcagctcgctgaccaggtcgttgatgccatcgctcatattgttgaagcgggtcaacggcgagcgggttaccaccacaaaggcgccaacgttagcctgcggattcatcgccatataggtgataaacccgccgccgccgccggttttctgaataatccccggatggccgttcttcggcttcatatacacccagccgaggcccagcgcgtcggcgcggcccggcacgtccataccaatcacccgggtcagctggttacgctgataaatcagcgtctgcatccggtcggcctgctggctgcgggtatagaaatcggatgacaggaactgctgcatccagcgcatcatatcccccggcgtcgagtagactccgccgctgccgatcgccgccagggtgttgttgcatgggctggcgcctttttccgggatcatcagccgctggcactgatccggtgacggggtaaaggtggtgtccttcatccccagcggccgggtgatctgctcttcaaacagctgcggatacggtttgccggcggcggtggcgagcgcgtctgccagtaaatcgaaggccaggttggagtaggccgcctgcgagcccggcgcggctttcagggtcgcggtagagagccagttccagcgctgctggcgggtcggccagacaaacaccggacgatgagcggcgccaccaggctgctcgcgcggcagggcgctggtatgggtcgcgagattcaccagggtgattggttttccctgccagtcaggcacccgggcgcccggcggggcgtatttactcagcggatcgttgagtttcaccaccccctggtcgagcagcttcaccagcatctcgctggtcatcagtttgctgagggaggcgatacggatcaccgagtcgagctgcgggtgctgattattccccgggcgggtttcgccaaagctgcgaaaaacacgctgattgccatcgataaccaccagcgccatgccggtggcgccgctgccgtagtagatatgattggcgtaacgatcgaccacatccgaggcgaaaaccgggtcaacggtaggctgtgcggcctgcaccgaggtccacgacgccgcgcacagcgcagcaaaaatgagcaaactacgtttcaacggagatcatccattaaataaataaaaagaagagggtatttatactacgaagtggcgcagaacaaagcgggattcacgacattcctgcaggaaaaaggtaacggtgcgtaaaaaagacttttttacgctttcggataccggcttttttcgccggcgcgtatgatgaccgtttggctgaaggttcgtgggagagaacaatgacggctcaacgggtagtgatggtcgtggatatgcaaaacggcgtgttcgccacgccgcgtctggcgcgcgagcgctgcgtcgcgcaaattaatcgtctggtgcgcgcggcggacaaggttattttcattcagcatgatgaagccggcggcctcgaagccggcagcgaaggcttcgccctgcttcctgagctggagcagccggctggcgcgctgtatgtcaccaaaaccgcctgcgatgccttctatcacacctcgctggcgcaggtgctggacgaacacgacattcagcagttcgtcatctgcggctgcgccaccgactactgcctcgataccaccattaaaaatggcgccagccgcgggtacgttattgttatcgcggaagatgcccacaccaccgccgaccgccccgccgcgcaggccgcgacgcttatcgcccactacaatgaggtgtggcgtaccctgaccattcctggcaatcctttacaggtgaaacccacagaaacaattctgcacgcatggcagcagaactaagctgttgatatccggtcttatcattcgtctgtcccgcgagggctcatccacgcggcggccgacgtatgcgtcgtacacagcaatagcagaacgataagaagttagcaggagacaatgatgtttaaatcttttttccccaaaccggggccgttttttatttctgcctttatctggtcgttgctggccgtgatcttttggcaggcgggcggcggcgactggctgctgcgggtcaccggggcatcgcaaaatgtggcgatcagcgcggcgcgcttctggtcgctcaactatctggtgttctacgcttactatctgttttgcgtcggcgtgttcgcgctgttctggtttgtctactgcccgcaccgctggcagtactggtcgattctcggcacctcgctcatcatcttcgtcacctggtttctggtggaagtcggggtggcgatcaacgcctggtatgcgccgttctacgacctgatccagagcgcgctggccaccccgcataaggtcagcatcaaccagttttatcaggaaatcggcgtctttctcggcatcgcgatcatcgcggtgattattggcgtgatgaacaacttcttcgtcagccactacgtcttccgctggcgcacggcgatgaacgagcactatatggcccactggcagcatctgcgccatatcgaaggcgccgcgcagcgtgtgcaggaagataccatgcgttttgcttccaccctcgaagatatgggcgtgagctttatcaacgcggtgatgaccctgatcgccttcctgccggtgctggtgacgctctccgaacatgttcccgacctgcctatcgtcggccatctgccgtatggcctggtgattgccgctatcgtctggtcgctgatgggtaccggcctgctggcggtggtggggattaagctgccgggcctggagtttaaaaaccagcgcgtggaagcggcctatcgtaaagagctggtttacggcgaggacgatgaaactcgcgccacgccgccgacggtgcgcgagctattccgcgcggtgcgtcgcaactatttccgtctctatttccactatatgtatttcaatatcgcccgcatcctctatctgcaggtggataacgttttcggccttttcctgctgtttccgtcgatcgttgccggtacgattaccctcgggctgatgacgcaaattaccaacgtcttcggccaggtgcgcggctcgttccagtacctgatcagctcgtggacaacgctggtggaactgatgtccatctacaaacgtctgcgcagttttgaacgcgagctggacggcaaaccgctgcaggaagcgatcccgacattacgttaatcaagacaaggaagcataatggccgcacgtttatcgcgcattattcccgtttcattgacgctgctggcggccatggcgctgagcgcctgtaccagccagcaggctccggcgctgaaagagggcgagaagcctgttgacgtggcgtcggtggtgcggcagaaaatgccggccagcgtcaaggatcgggaggcctgggcgcaagccatcgccaccgcgtttgacagccagaagctggcgccgacggaagaaaacgtctgctcggtgctggcggtcgcgcagcaagagtctaactatcagtccgatccggtggtgccggggctgaataaaatcgcctggcaggaaattgaccgccgggcggaaaaaatgcacattccgccgtttctggtccataccgcgctgaagatcacctcgccaaacggtaaaagctatagcgaccgtctggacaatgtgaagacggaaaagcagttgagcgccatttttgatgactttatcgggatggtgccgatggggcagaagctgttcggttcccttaacccggtgcacaccggggggccgatgcaggtcagcattgcttttgccgagcagcacacctccggctacccgtggaaaatgaacggcacggtgcgccaggaggtcttcagtctgcgcggtggcctgtggtttggcacctatcatctgctgaactatccggccagttatagtgcgccattgtaccgctttgccgacttcaacgccggctggtacgccagccgtaacgccgccttccagaacgcggtggtgaaagccagcggggtaaaactggcgctcgacggcgaccttatccgctacgacagcgaggagccgggcagcaccgagctggcggtgcgtcgcctggcgagccagctggggatgagcgacagcgagatccatcgtcagttgaaaaagggcgacagcctggcgtttgagaagaccgatctctatcagcaggttttccgtctcgccgagaaaaagacgggcaaaaccctgccgcgggagatgttgccagggatccagctggagagtccaaaaatcacccgaaatctgacgacggcgtggtttgcgaaacgggttgatgagcggcgggcaaactgtatggcgcggcgttaacggcgctgacgccagcgcacgataagcgccagtaccccgatgaacgtgcagccgatcaggaaagggatcagaccaaagagggtacccacggcgaggctgatgtcgacttgcggacggctggcgtcctgggcttgcatcaggcgttcaaatacccccggggcgtggatcagcatgctgagcatctgcgcgccggcccagcagcagatcaacacgaacagcccgtaggcgacatggctgccggtcagcgcccccctttttttatttcccaaaagcgattttgaaaaactgaattcagccataggccctcccacatctgcgctgctggttttttctccagctctatgtcaggtattctggcagtcaggggccatcatcagtatcagattgctggtaattgccgtccaggaataatcctgttttcgccgttgtgttaaccgcgccacaggagcacaaaagggagagcggcgtcgcaatccagcaacattctccatatcgctacagaccgccgcgggcggctatgcgaagatgcgttttttgctgttggaggccgcatgaagctcactgataaaattcgccgcgattggcactactacgccgtggcgctggggttgatttttattcttaatggcgtggtggggctgctggggtttgaaactcaggggtggcaatcctacgccgtcggtctgatcacctgggtcattagcttctggattgcgggctttgtgatccgccgccgcccggcagaagaggcctgaggccgccgctgccaggcggggtaaaatgcgttttagttcatggaggttttcagcgcccggtccgcggcatggcgctccaacgccagctcaatcaggcgggtgatcaggctggtgtagtcgagaccgctggcctgccacagcttcggatacatgctgatgttggtaaagcccggcagggtgttgatctcgttgatcaccacctcgttgtcggcggtgaggaacacgtcgacacgagccatgccgctgcagcccagggtctggtaggcctgcaccgcgatagcgcgaattttgtcgttgatctcaggggcgatagcggccgggactaccacctgtgcgccctgatcgtcgatatacttggtgtcgtaggcgtaaaactcgctgttgaggacgatttcaccgcaggtgctggcctgcgggtggtcgttacccagcaccgcacactcaatttcccgccctttaatgccttgctccaccaccactttatggtcaaattcgaaggccagggccaccgcctgatggtactgctcttcgtttttaactttgctgacgccaaccgacgagccctgattagccggcttaacgaacagcggcaggccaagcttcgcttcgacatcggcaaagctgaactgcgcgcggttggcgcgggtgagtgtgataaacggggcgacggcgagcccggcgtcgcgcagcagacgtttggtcacgtctttgtccatacaggccgcagagcccagcacatcggagccgacgaacggcagattcgccatgcgcagcatcccctgcagggagccatcttcacccagcgtgccgtggacgatcgggaaaatcacatcgatggccgccagcggttggccgctttcggcgttaatcagctgctgcgcttcgcggcccgggatctgcgccagagtcaccgtggaagggcgcagggcaatgcgggcaggatcctgtgcgttgagcaggtagttgccggcgtcgttgatatgccacagcccctgtttatcaatacccaacagaaccacatcgaagcgcgatttatcaatcgcttccacgatattcttcgctgactgcagcgacacttcatgctccgccgacttgccgccaaaaacgatcccaaccctcatctttgccatttcaacttccatccagataacatcaaagggcataacataccatgtgaaaccgctgcctggctgccataatatttacctgatcaattgacgggagtgggcgtgagaggaaagacgctgctggtgctggccgggctgctcggcgcgggcctgttgggataccgcaatctgccgccgcacctgaatccgctggcgccgctggcgctggacgatcccccgggctggctgacgtcgtttaagctgcgcaggctgacggcagaccagtgcgcctccttgctggcggaagccaatcgccggcggcttatcgccagccggccggtggccgacagcgagggaagctgccctctgcgtaacgtggtgcgggtggcgaattttggctcggtgcagctgagcagtagttttctcgccagctgcccgctggcgctgagcagtgcgctgtacatcgagcagcaggcgaagccgctgacccggcagctgatggcgagcgatctgcgtcagatcgatcatctcggcagctttgcctgccgcaatatttaccatcgtcaacaggcgcggcgcagtgaacacgccacggcggacgcgctggacgtcagcggtttccgtctggcggacggtagacgcgttagcgtcctgcagggctggcggagcgagacttcgcgcccctggctggcggcgctgttgagcagcagttgccattacttcggtaacgcgctggggccagagtacaacgcggctcacgccaaccattttcatttcggcatgcgcgggcagggcttctgcttttgagcataaagcgctatgagcagcctaaatgaccagaaaatgcttcgtcaggctctcatccgcagccataaaacaccaaactcaccgccagcgcatctatggtagtacaccagtgggatgaaattgctaagctagataataattggcaaatcattaatgaatacgcgtagttatggaatcctggaaggttaatctcatctccgtctggtttggttgcttttttaccggcctggcgatcagtcaaattctcccctttttacccctctacgtctcccagctcggcgtcacctcgcatgaagcgctatcgatgtggtcggggctgaccttcagcgtcacttttcttgtctcggcgatcgtctcgccaatgtggggaagcctggcggaccgtaaaggccgcaagctcatgctgctgcgcgcctcgttggggatggcgattgccattttactgcaggctttcgccaccaacgtctggcagctgtttatcctgcgggcgatcatgggcttaacctccggttatattcccaacgccatggcgctggtggcctcccaggtgccgcgcgagcgcagcggctgggcgctaagcacgctgtcgacggcgcaaattagcggggtgatcggcggtccgctgctgggcggtttcctggcggaccacgtcgggctgcggatggtcttttttattacggcgatcctgctgaccatcagttttctggtgaccctgtttctgattaaagagggcgttcgcccgcaggtcagcaaaagcgagcgtctcaccgggaaacaagtctttgcctctttgccctatccggggctggtgatcagcctgttcttcaccaccctggtgatccaattgtgcaacggctcaatcggcccgattctggcgctgtttattaagtcgatggcgccggacagcaacaatatcgcttttctggccgggatgatcgccgcggtgcccggcgtgtcggcactgatttctgcgccacggttgggtaagcttggcgaccgcatcggcacctcgcggatcctgctggcgacgctctgctgcgcggtggtgatgttcttcgccatgtcctttgtcaccaccccgctgcaattgggtacgctgcgttttctgctcggctttgccgatggcgcgatgctcccggcggtgcagaccttattgctgaagtacagcagcgacagcgtcaccgggcgtatctttggctataaccagtcgtttatgtatctgggcaacgtcgccgggccgctaattggcgcctctgtgtcagccatggccggcttccgctgggtgtttattgccaccgccattatcgttttcattaacctctggcagctggcgtggatgctgcgccaaacccgccgggctaacgcctgaacctctgctgacggtatttatcgcgataccgtcagcattattcgcctcagcggatttactattactttttgttatcgtcatggcgtgaacgctattccattttattattttccaggcaatctggttataagcaaccccggtcatgattaaacaatactatttatagtggtattttattgtggtaaaacgtttcgctgtatattgggtgttgcgatgattcttaatttaagtaattctgaggtccgtcatcgcgtatgacatcccaatcaaaacaggcctcgcataaggaactggtgctatgaagaatctcattgctgagttactggttaaactggcgcaaaaggaagaagaagcaaaggaactgacggtgcaggttgaagcgctggagatcgtggtcaccgcattattgcgccatatggagcatgatgcccagcaggcattgattcaggatattgaacaggcgattgaccaggtgaccccctgtccaccggtcaacgaccatgatgcgatgctgttgcagcaatatctaaagaagctgttgcggcatcctcgtagctagtctttgtgacacgacaaggatgccgtcatttttctgtcatctcccttttataaagtctccctcgttttgtttttttaagtattttttacatggagatgacaaaagtgaaattaagcgccctgtttattgccctgattcctctactgggctcgccggttattcatgcagaaactactgctgcgccggttctggaaaatcgcgctgcgcagggagatatcaccactcctggcggcgcgcgtcgtttaacaggcgatcaaaccgaagcgctgcgcgcctcgttaatcaataagccagctaaaaacgttattttgctgattggcgatggcatgggtgattcggaaattaccgctgcgcgaaactatgccgagggggcgggcggtttctttaaaggaattgatgctctgccgttaaccgggcagtacacgcattattcgctggataaaaaaaccgggaaaccggactacgtgaccgactcggcggcctccgccaccgcctggaccaccggcgtgaagacttataacggcgcgctgggcgtcgatattcatgagaatgcgcatcagaccatcctcgagctggcgaaagcggcggggctggccaccggcaacgtttccaccgccgagctgcaggacgccacccccgcggcgttggtagcgcatgtgacatcgcgtaaatgctacggcccgacggtcaccagcgaaaaatgccccagcaatgcgctggaaaaagggggcaaaggctccattaccgaacagctgctgaacgcccgaccggatgtcaccctgggcggcggcgcgaagacctttgccgaaacggcgacggcgggcgagtggcagggcaaaaccctgcgcgagcaggcgcaagcgcgcggctaccagattgtgaccgacgcggcttctcttgccgccgcgacggaagccagtcaggataaaccgctgctgggactctttgccgatggcaatatgccggtacgctgggaagggccgaaggcgtcttatcacggtaatatcgataagccgccggtgacctgtacgccaaacccgaagcgtgacgcctcggtgccgacgctggcgcaaatgacggagaaagcgattgacctgctgagtcgcaacgagaaaggtttcttcctgcaagtcgaaggcgcttccatcgataagcaggaccatgcggccaatccgtgcggccagatcggcgaaacggttgatcttgacgaagcggtgcagaaggcgctggaattcgcgcgaaaagacggtaataccctggtgatcgtcaccgccgaccatgcgcatgccagccagatcatcccggcggatagcaaagccccggggctgacccaggctctgaacacgcacgatggcgcggtgatggtgatgagctacggcaactctgaggaagagtcgatggagcacaccggcacccaactgcgcattgcggcctacggtccgcatgcggctaacgtcgtcggcctgaccgatcagaccgacctgttcacgaccatgaaagctgccctgagtctcaaataagtcgctgccggtggcgaaattgcgtcaccggctggttttttttctatctgcgtccagacttacaacgttccactcacagaaggatggtgcgatgaaaataactttattgatgaccctactgtttggcttgatctttatcagcgcggttggcgcggcagaaaaaacgcccactcctcagcagcaaaggatgacggactgcaatcagcaagcgtcagccaaaatgctgaaaggtgaggagcgcaaaacctttatgagccagtgtctgaaaaaagagaccacgacctcgcagggaaaggcgctcacccctcagcagcagaaaatgagcgactgcagcaaagcggccacggcgaaatcactgaagggcgatgaacgcagtaccttcatgagtagctgcctgaagaaagcctgaaaaaaagggagcgcacgcgctcccttgttctttaacctctcagggcttgaagcccgccggctcagcttcaggagcggctcagtttctctgatttttccatacactgggtgatggcttcgattaccgccgagcggaaccctttctcttccagcacgcgcacggcttcgatggtggtcccgccaggggaacagaccatatctttcagcgcccctgggtgttctccgctctccagcaccattttggcggagcccatcaccgcctgggcggcgaatttataggcctgagcgcgcggcattccgccgaggacggcggcatcggccatcgcttcgataaacataaagacataggccggcgccgaaccgcttacccccaccaccggatggatcatcggctcggcaatttgctccgcctggccaaagcaacggaaaatagtcagcacttcggcaacatcttcgctgctcaccagggcgttaggcgtgacggaggtcataccggcgttaaccagcgacggcgtattcggcatcgcgcgaatgattttgcgatcgtggccaagggcgcgcgccagctgctcaagcgtaacgccggcggcgatagagaccaccagcgactctttattcaggctggaggcgatatcgcccagcactttggtcatgatccccggtttaaccgcgccgaagacgatatcggcaatctgcgccacttcctgggcgctgctggcggcgttgatgccatactggtcgcgcagagctgcaaccttgtccggcgacggggtgtagacccagatttgtcccggctgtacctgaccgctggcgatcagcccgcccagaatggccttacccatattgccgcagccgataaagccaattttcttatccatcaccattcccctctgcttttttcgttacgatctgattagcttaccatcctggcgctttcctgggggagaaaagcaggtaacattggcgtcacttattgcaggtaacaggagctggcatggccatttgggtggatgcggacgcgtgtccgaacgtgattaaagagattttgttccgcgcggcagagcggacccagactccgctgacgctggtggcgaaccagccgctgcgcgtgccgccgtcgcgtttcatccgcaccctgcgggttgagcagggttttgacgtggcggataatgaaatcgttcgccagtgcgcggcgggagatttagtgatcaccgccgacatcccgctggcggcggaggtgctggcgaagggcggggcggcgctgaatccgcgcggggaacgttacagcgaggcgacgatccgcgagcggctgacgatgcgggattttatggagacattacgggccagcggcgttcagaccggcggcccggatagtttatcgcagcgcgatcggcaacagtttgccgccgagctggagaagtggttgctggcggttaagcgtcgccagggttaaacccagctatcgtcatcgctgccaaaatcatcgtcgccaaagccggcgtcgaagtcgtcgttccaggtattgtcggcaaggaactgatcgtctccctggcggaacggatcgtcacctgcggtggtgtcctgcgcgatgctgtcctgcgcggaggcggcatcaggctgcggcttctcttcgatgatattgacgatctcctgcgggtgcgagccgctgaacatattggtcagcatattgcccagcaccacgccgcctgccacgccagcggccgtttgcagcgcgcccgccataaagccgccgccgcgtgcggcagcctgcggggcatagttctgctgcggtggtggcgtatactgcggctgagcgctggcctgcgggcgaccatattgctccgcgcccgggatagggtcagaaccgcgtgacgagccgccaccgccaaacaggccagagaggaagccgccgctgctgggctttgccgcctgcagttggctgacctgactctccagcgcctggatgcgatcgttaagctgtttaatcgcggcttcctggataagaatggtttgcgccatatagtagggggccgccggctgcgcgctcacgtgttgggcaatccgctcctcggcgctggcatcgcgcgatgcgctgtgcgcctcagcctctttcagccgggaaaacagtccatcaataaggcgttgttcttcagattgcatgttacattcctctgtcacactgtcgaataggcatcagggtgcttctgaaacatgatgttgtaaatatgttgcttcgtaaagctatgcataaatgtgttaccgtttacgccagcggtggataaaaaataacgccaagcggaaagtaaagctggttaaacactaaatgcaatgataagtttacattaatagcccctcttctcaccgtggtaatggggtgtaaagaagttgtgtaattttttctttacgtatgcattgcgggacagacagcgataatacgtgctttcgttttcatttttttgcgacagacggaaccagggggtcttcggttatgacacagcctatctttcttattgggccacgcggctgcggtaaaaccaccgtcggccatgcgctggcgcgagcgcggcattttcagttctccgataccgatcatcggctacaggcccatgagcagcggacggtggctgagatcgtgcaggcggaagggtgggcgcgttttcgcgaactggagaccctgtcgctgaaggccgtgaccctgccgaatacggtaatcgccaccggcggcggtattgtgctggcggaaggtaaccgtcagtttatgcgggagaatggcgtggtgatttatctgcaggcctcggtgtcggcgctgattgaccgtctggaagcctacccgaaagccgaacagcggccgacgctgaccggaaaaccggtgcgcgaggaagtgggcgaggtgctggcgcagcgcgaagcgttataccgggacgctgcccaccatattgtggatgccacggcctcgccggatcgggtggtggagcagattatgtccatgctatgcagcgcgacggcaaccccggtaagttaagaatttacttacattaaggcggcgaggggcgcctatacttaatagttctgctaccagaagaaggaagaactatgccaaacaggcccccatatccgagagaagcgcgcgtggttgcggtagagaaaggtcctcagggtcagacggtgacctggtatcagctccgtgcggattatcctgagcctgattcgcttatcagcgaacatcctaccgagcaggaagccgtggatgccaaacggcgttatgaagatcctgacaagtcgtaatcccctgagcccgaattgcccgccatgctggcaaaatcgggcgtatctcacattttttatttatcagtcgtactaatgaatatctaacacacggatttttcaggcacggcgccgccgcccggcaatctttacattcaaccgcggcgtggagctgctacgcttctcgacggttgatttttactcaccaggggggcggatgctgtgtgtggaaagcctgtgttgaagcagtggttgtgaaaaggtacatgatatgagtagtgcaacgatggcaattttgaccatcggcgttgtgccgctggcgggagtattgccgctcctgaccgaacatatcagggaagaacagatcgcccacatcagcctgctgggcgagatgacgcctgacgaggtaatggccgagtacgccgtaggtgacggcgagaaaggactcctgaccttgctcagtaataaccagttggtgatggtgtcgcgacagaaaattgagcgcgatgtccgcagcgcgatcgcgatgctggatcgacaacattatgatgtgatcctgctgctcagttccgaacagctgaccggttttaccacccaccacgcgatcctcctcgagccgcagcggatcatcccgccgctggtggcatcgatcgtcgatgggcaccaggtaggggtgatcgtgccggtggaagagatcatgcccatgcagcggcaaaagtggctctcgctggaaaagtcgccatactacgcgctggccaatccgtttaccggcagcgacagcgagctattaaccgccggcaaaacgctgctggagcagggcgccgacgtgctggtcctcgactgtctcggttactatcagcatcatcgcgatgtgttacaaaaagccctcgatgttccggttttgctgtcgaatgtgctggtttcccgactggcggcagaactattggtctaatgtgttaatttcgcgtgacaggggcaaggagcgccccctatattgagcctttaaccgacgatcagaagggcttgtttatgcttcaaagcaatgaatactttgacggaaaagtgaaatccattggcttcaccagcagcagtaccggtcgcgccagcgttggcgtgatggcggaaggggaatacacctttggtacggcgcagccggaagagatgacggtagtcagcggggcgctgaatgtcctgctgccgggtgagactgagtggaaagtttacgctgccggcgaagttttcaatgtgccaggcaacagcgaatttcatctgcaggtggctgagccaacctcttatctgtgccgctatctgtaagccagcgtgacgcccggcgtctgccgccgggttgttttttccttcctgcccggcaggaaggaaagcggcgcttagcgctgcgcttcgccgccgagcccttccaccaggctttggatcagggcagccagctcgccggtcattaagataaagtcggcgtcaaagcgctgggcgaaatcttcccgatcgatatcttcgttttggtcgcgcagttcatcgcagaacttgaggcgcttaattgacgcgtcgtcgcagatcacaaactgaatacgctgctgccagtccagcgccagcttggtgacgaccttcccggcctcaatgtgtacagcgatttcgtcgctaaccagatcctgcttcttggcgcggatcacgccgccatcttccagcatcgctttcagctcggcttcgtccagcagctggaagccctgcgccacggtgccggagcggacccactcggtcagcgttagctcaatcggattctccagggtcagcggcaccaccggcagcgagccgagggttttacgcagcagggccagagtatcttccgctttcttcgcgctggcgcagtcgaccatgatcaggccgttgacggtgtcgatccacatcattgtctggctgaagcggctgaaggcgcgcggcagtagcgagtgcagcacttcatctttcagggaatctttctcggtcttcttcagcttgcgcccctgatcggcttccagcttctggatctttgcctccagcgcctgcttaatcaccggcgacggcaggatcttctcttctttacgcgcgcagataatgatctggccgtttgccgtatgcgtcagcgcgtcgctgtgcgatcccatcggcgacacccaaccggttttcgccatatcctggctgccacaaggggtaaatgtcagctcggccagctgtttttccatctcctcggcgcgcaattcgatatcgcggctgagacggtaaaccattaaatttttgaaccacagcatgataatttccacggctttgtcgttaaatcaggcgggcatgatagcgaattgtcgctatgcttgcattgttaatcggggtgaggagctgagcgtgcgtattggtattgatttaggtggaacaaaaaccgaagtgatagccctgagcgaccagggagagcagctgtttcgccaccggttacccacgccgcgggaggactaccggcaaaccatcgagaccatcgccaccctggtggcgatggccgagcaggcgaccggacagcagggtaccgtggggatgggcattcctggctcaatttcgccttataccggggtggtgaaaaacgccaactcgacctggctcaacggccagccctttgataaggacctcagcctgcgccttgagcgggaagtccggctggctaacgatgccaactgtctggcggtgtcggaagcggtggacggcgcggcggcgggggcgcaaacggtattcgcggtgattatcggcaccggctgcggcgccggggtggcgctcaacgggcgggcgcatatcggcggcaatggtaacgctggcgaatggggacataacccattgccgtggatgaacgacgatgagctgcgctaccgtgcggaagtcccttgctactgcggcaaacaggggtgtatcgaaacctttatctccggcaccggtttcgccaccgactatcagcggctgagcggcaaagggttaaccggcagcgagattatgcgcctggtgggagaaggtgacgaaaaggctgaactggcgctgagccgctatgaacagcggctggcgaaatcgctggcccacgtggtgaatatcctcgacccggacgttatcgtgctgggcggcgggatgagcaacgtcgaacggctgtatcagacggtgccggacctggtgaagcagtgggtcttcggcggcgagtgtgaaacgccgatccgcaaagcgatgcacggcgactccagcggggtacgcggcgcggcctggctgtggccgctccaggggacctgaaccgcttccccgccccctaaccctctccctcgggagagggttagggggcggggacatcgccataattcagacctcactccaccgcaaacgctttgtccagccggctatagcccaggccgttaatcttcttcactttgatctgcaccggaatgcggtctttcatcgcctccacgtggctgatcaccccgataatcttaccgctggcgttaagggcatccagggcgtccagcgccgtgtccagcgtttcgctgtcgagggtgccgaagccttcatcaagaaacagggagtcaatccgcgtcttatggctcaccaggtctgacagcgccagggccagcgccaggctgacgaggaaactttcgccgccggagagggtgcgggtgtcgcgcacggcgtcggcctgccaggtatcgacaacctccagctccagcgcctcgctggccttgcgctgtagcagatagcggccatgcaggcggttgagctgctggtttgccagccagaccagattatccagcgtcagcccctgggcgaatttgcggaaccggtcgccggtgctggagccgatcagcgaattgagatagccccagtcgtccgccagctgcgccgcctctgcaatctgctgccccagcgcctgctgctgttgacggctctctgcgtcctgcctgagctgctggcggatctcaccctggcgggtagtgttatcccgcagccgctgggccagggcgtgcagctgggtttgcagggtggggacgtcagcgtccaccccttgcggacgcagcgccaggtgcgcctcatgttgccgggtcgcctgctcgcagagcgcggccgcctgctgaagctgctgctccagcgtctgttttaactgcgtcagccgctgggcggtctcgtcatccagcagcgcggcgaggaacgcctcccgatcgctaaagcggctggcggccagggcggaggtgaattgcgcctgcgactggtccagacgcgccttttcctgggtttcctgctgctgctgggcgacaagctggctgtgcagcgacaggcattcctcgtggatttcgcgccagttgtccgggatggccgactcagcttcaacctctgtctcgtcgctggtcggcagcgtctccagcagtggccgcagagcagcgatttgctgctgaatggcatcatgttgggtctgttgcgcctgccactgggcaaattcgctttcgcgagcgtgcagccaggcggcttctgtcccttctgccggcaggctcagggctagggcctgcagggcgctttccagtccctggcgcgtggccgccagctgctgctcggcctggcgctccagcgcctgctgatcgttaagctgactctgcaacatcaggcgctggctgagctgatagagctgctgctcgtagcgctcctgctcctgcatccagtcgtttatctcttgcgcaatatcccgcgtgatgtgcagagaggcgcaggtctcctgccacgctttagtaagcgcttgctcttcctctgcgagccgcccggccgcttcggtgtcacgctgaagctgttgcgtcagggccttgacctgcccgaggatcagcaggccttcttctttcagcgcggcgacctccttttccagcgcatcgcggcggcgctgattatccgtgagcgtcaacgaggcgtattgttcaatcgccgggtgttcacaggcgccgcacagcggacagggctttcccgcctcgagccggtcgcggtagctttccaggtctttaatcgtttcttcccgctggcagagcgccttcaggtcgagatagtgctggtttttgtctttatattgttcccggcgcagcgtcagggtagcgttaagttttacctgctccgcttgcgcctgctggacgctgtcggcgttctggcgcagacgcttgcgcagcagctgatgctgttcatgcagggagagcaggcgctggcgcagcggccgcgattgggtttgctgttctatcgctgcggcaacgtcatccgcgctcagggtgagagggctggctggcagcgtggccagcttctggcgtagcgcggccaggcgggtgctctgagccgttagctgttgtttatcccgcgtcagttgcgagaattgcgctcgccagccggcgatctcctgaccccataagcggaaacgctcatgggcggccagccactgcgccagatcggccagttcagcctgacgctgctgctgagcgcgcaaggcgccctggcggatgcgcgcgcgcagcgccgtgctggcaagtaagcgagcatttacttcactgatccgctgccgggtttgcgccaggcctgccgtctgctcctgctggcgctcccacaggggacgcagttgggcggcgggctgggccagctcaagcttcgccagcgccggggcggcgtccgccagcgcctggcgggcctgctgctgccgggtggcggcctgctgctgctgctgcgccagctcgtcgcggcgggtcagccactgaagctgctgctgctggctctgctgctgggccagcagggctttttcttcgtcagtaagtacctgcaaactttcctgcagcgcctgctgctgggcctccgtcaacaggacgatgcccgccgcctgggcttcgaacttctccagcgcgtggcgagcggctttgtgctgttcgtagaccatggctgaaatctggccgtagatttccgtgccggtcagctcctccagcagctccgcgcgatcgctcggcttcgcgttcaggaaggcggcaaattgcccctgggaaagcagcatcgagcgggtgaagcgaccatagtcgaggccggtaagcgtcgcggtttgctccagcttgtccgagactttatcggcgaggattttgccgtcagcgcagcgcgccagctcgacgcggggcgcctgcagattgccatccggctggttacgggcccggttctggctccagaaagcgcggtaggcgatgccttttacttcaaactcgacttccgccagacactcggcggtatcgcgggtcatcaggtcgttttgcgactgggagactttattcaggcgcggcgtttcatgatagagcgccaggcaaatggcgtcgagcagcgtggttttcccggccccggtggcgccggtaatggcgaacaggccattgctggcgaacggctcggcggtaaagtctatcttccattcccctttcagggagttgaggtttttcagacgcagactgaggattttcatacgttttcgtcctccgcggtgagcgtatgcaccgtatgggcgaacagctcatgcagccgggcgcgcttcatatcgtcaatttcggtcagcgccagccggcgctcgaatacctcctccaccttcagttcactgagcgtctcccgctgggcgttgagcagtattttctcgcgctgctcgcggctgcggcgcaccagcagcacttccaccggcagatcctccgtcagcgcctgaatatgccgctgaatatcgtgcagatagtcctcggtggtgatttcgatatccagccacaccggcgggtcctgctcgacgccgcgccactgctccagctgggcggtgatggcggccagatcgcctttgattaccgccagaggctgggtcacgggcacctccagggtttccacggcgctaagtcgcccctcgctaaagctcaccagatgcaccgatttcgctttgccggtttcatcgaagctcagcggcagcggcgagccgctgtagcggatatgctcgcagccgccgaccatctgcgcccggtgaatatggcccagcgcaatgtagtcggcaggggggaagtgttgcgccggaaaggcatccagtgtgccgatgtaaatgtcgcggacggcatcgcttttgctggcgccgacggtggtcagatggccgctggcaatgatgggcagcggccgatcgccgcgcagcgcgcaggcctgctgatactgctcctgataatagtcgctgatggcgtgcagcagcagctgctgtttttcccgaccggagtgaccggcctggctggtcaccagctcgcgcgggcgtaaaaacggcaccggacagaagatggcgcccggcgtgccgtcgcgcagcggcagctcaatcggcgcgtagccggcgttcgccaccacggtggtgtgtaaaaaggcgaggatatcgcgggattcattgagcatcgccaccgagtcgtggttgcccgccagcaccaccaggcgacagccggtctgctgcaactggacgacgaaacggttatacagttcgcgggcgtagctcggcggcgagccggtatcaaaaatatcgccagccacgataatggcgtcgacttcatgctcctgcgcgcggtccagtagccaggtaagaaaagcgtcgtgttcggccgcgcggcttttgctgtaaaaattctggcccaggtgccagtcggaggtgtgaaggaggcgcataaatcttccctagcgaaaaaagcatgggcggcagtataccacttgttagtgaggggtaagtccgcgtcgtgcttcaaaatacccgatcatcagacggtcatttttttcataaatctgtcacaaaagtgacgcataatgacgccgcacttctatactgatggctaaaaaaaacagggtaaataatggcgagaagaattctggtcgttgaagatgaagctccaatccgcgaaatggtctgctttgttctggagcaaaatggctttcagcctgtcgaagcggaagattatgacagcgcggtgaatcaactcaatgaaccctggcctgatttgattctcctggactggatgctgccgggcggttcggggctgcagtttattaaactgctcaagcgcgaggcgatgacgcgggatattccggtagtgatgctgaccgcgcgtggagaagaagaggatcgcgttcgcggcctggagaccggcgcggatgactacatcaccaagcctttctctccgaaagagctggtggcgcgaatcaaagcggtgatgcgccgtatttcaccgatggcggtggaagaggtgatcgaaatgcaggggctgagcctcgacccttcatcgcaccgggtaatgaccggcgacagtccgctggatatgggaccgacggaatttaaattattgcacttctttatgacccatccggagcgggtgtacagccgcgaacagctgctgaaccacgtctgggggaccaacgtttatgtggaagaccgcacggtggacgtccatattcgccgcctgcgcaaagcgctggaacacagtggccatgatcgtatggtgcaaacggttcgcggcacggggtatcgtttctccgcccgtttctgaattttgacaggagtgtgacccgtgctggaacggctgtcatggaaaaggctggcgctggagctctttttagcgtgtattccggccctgattctgggggcgtttgtgggtcatctgccgtggtttttactggcggcagtgaccggtttgctgatctggcatttctggaatttgatgcgcctgtcgtggtggctgtgggtggaccggagcatgactcctccgcctggccgcggcagttgggagccgctgctgtatggtctgcaccagatgcagatgcgtaataaaaagcgtcggcgcgagctgggaagcctgattaaacgctttcgcagcggggcggaatcgttaccggatgcggtcgtcctgaccacggaagagggggctattttctggtgtaatggcctggcgcagcagattctaaacctgcgctggccggacgacagtggccaaaacattcttaaccttctgcgctatcctgagttcgccaactatctgaaacagcgcgatttttcaaagccgctcaatctggtgctgaataacgcccgtcatctggaaattcgcgtgatgccctacagcgacaagcagtggctgatggtggcgcgcgacgtgacgcagatgcatcagctggaaggggcgcggcggaactttttcgccaacgtcagccatgagttgcgcaccccactgacggtgctgcagggctatctggagatgatgcaggagcaggtgctggagggggcgacccgagaaaaagccctgcacaccatgcgggagcaaactcagcgtatggaaggtctggtgaagcagctgctgacgctgtcgcgtattgaagccgcgccggcgctggcgatgaatgatcgcatcgacgtgccgatgatgctgcgggtggtggagcgcgaggcgcaaactctcagccaggagaaacagacgctgatcttcaccgtcgatgagcagctcaaggtgctgggtaatgaggagcagctgcgcagcgccatctccaacctggtctataacgcggtgaaccacaccccgccggggaccgaaattcgcgtcagctggcagcgaaccccgcagggagcgctgttcagcgtcgaggataacgggccaggcattgcgccggagcatattccccgtctgaccgagcgtttttatcgggtggataaagcccgttcccggcaaacggggggcagtggcctgggactggcgatcgtcaaacacgcggttaaccatcatgacagccggctggaaatcgacagcacggtgggcaagggaacccgctttagcttcctgctcccggaacgattaattgccaaaaatgacgcctgatcgacgcgctgtcagtttatcttgccaatgaccagcttcagctggtcattttcattggcagtcgttttttctcgcctatttaatgagcgtgcgctgcttttttgttcgcatgataagccacgggttttctatcaatatggtaaatgattctggtgtgaaagacataaccagcataatcatctgcttttgcgatcgtgccttgctttaaaacgttataagcgtttaaattgcgcctgcgcagtcgatgacagactgcttttgcgtggtaataccaaaaacaattctttcccacgccgcttcgggagcatatctcgctgagtttaccggcaatggccgctgtatcgtccctgagaggggagcgcggtatttttccatttttttacaacaccacatccacaggcagtaatgaatttatgacccatcagttaaaatctcgcgacatcatagcgttgggctttatgaccttcgcgttgttcgttggcgcaggcaacattattttccctccgatggttggtttacaggcgggcgagcacgtctggacggcggcgatcggcttcctgatcactgcggtgggtctgccggtgctgacggtggtggcgctggcgaaagtcggcggcggcgttgaaagcctgagcaccccgattggtaaagtggccggtatcctgctggcggtggtgtgctatctcgcggtaggaccgctgttcgcgacgccgcgtaccgcgaccgtctcctttgaggtcggtattgcgccgctgaccggcgacggcccgctgccgctgctgatctacagcgttatttacttcgcgctggtgattctggtctccctctatccgggcaaactgctggacaccgtgggcaatttccttgcgccgctgaaaattatcgccctgattgtgctggcggtcgccgccatcatctggccagcgggcccgatcagcgacgcgctggaagcgtatcgtacggcgccattctccaatggcttcgtcaacggctacctgaccatggataccctcggcgcgatggtgttcggcatcgtgattgttaatgccgctcgctcacgcggcgtcagcgaagcgcgtctgttgacccgctataccgtctgggctggtctgatggcgggcgtcggcctgaccctgctgtatctggcgctgttccgtctgggctctgacagcgctactctcgtggatcagtccgccaacggcgcggcgatcctccatgcctacgtgcagcacaccttcggcggggcgggcagtttcctgctggcggcgctgatcttcatcgcttgcctggtgacggcggtgggcctgacctgcgcctgcgctgagttctttgcccagtatctgccgttctcctatcgcacgctggtctttgttctcggcctgttctccatggcggtctccaatttgggccttagccatctgatccaggtatcgattccggtgctgaccgctatctatccgccgtgtatcgcactggttgtattaagctttacccgcagttggtggcataattcgtcccgcgttatcgcgccggccatgtttatcagcctgatgtttggtatcattgacgggattaagtcatcggcatttgccgcgattctgccggactggaccgcgcgtctgccgctggcggagcagggcctggcctggctgatgcccaccgccgtgatgaccattctcgcggtgatctgggatcgcgcagtcggacgtcaggtgacttccagcgcgcattaaccggcggtgaggacaagcgtttaaccacgggacttcgggttccgtggttttttattttttgtgttaaacggcattgaaaaaccacgatggaaagtagtaacaagcttaagcgcgggctaagcacccggcacattcgctttatggccctgggttccgccatcggcaccgggcttttttacggctcggccgacgccattaaaatggccggacccagcgtactgttggcctacattatcggcggcgtcgcggcatatatcattatgcgggcgctcggtgagatgtcggtgcataaccctgccgccagctcattctcccgctatgcccaggaaaacctcggcggactggcgggctatatcaccggctggacctactgctttgaaatcctgatcgtcgccatcgccgacgttaccgccttcggcatctacatgggcgtctggttcccgacggtgccgcactggatctgggtgctcagcgtggtgctgatcatctgcgccgtcaacctgatgagcgtcaaggtgtttggcgagctggagttctggttctcgttcttcaaagtggccaccattatcatcatgatcctcgccgggttcggcatcattatctgggggatcggcaacggcggccagccgacggggattcataacctgtggagcaacggcggcttcttcagcaacggctggctgggaatggttatgtcgctgcagatggtgatgttcgcttacggcggcatcgaaatcatcggcattaccgccggtgaggcgaaggacccggagaaatccattccgcgcgcaatcaactcggtgccgatgcgcattctggtgttctacgtcggcacgctgttcgtcattatgtccatctacccgtggaatcaggtgggaaccgacggcagccccttcgtcctgaccttccagcatctgggcattaccttcgcggccagtattcttaacttcgtggtcctgacggcttcgctgtcggcgattaactccgacgtgttcggcgtgggccgtatgctgcacggcatggctgagcagggcagcgcgccgaaggtgttcgctaaaacgtcgcgtcgcggtattccgtgggtgacggtgatggtgatgaccattgcgctgctgtttgcggtatacctaaattacatcatgccggagaacgttttcctggtgatcgcctccctggccaccttcgccacggtgtgggtgtggattatgatcctgctgtcacagatagccttccgccgccgtctgtcgcccgaagaggttaaggcgctgaaattcaaagtccctggcggggtggtgaccacggtgatcggcctgctgttcctggcctttattatcgcccttatcggctatcatccggacacccgcatctcgctgtacgtcggtatggcgtggattgcgctgttgctgctcggctgggtctttaagacccgccgtgagcgccgcctggcgcaggctcagtaatcgacatcgccccggtcagcatcgcgcggccggggcggcttgcggtcccgcgtcctcccccgttatcctcccccaaaaagttctgagatgatgagttctgcgcccggcggctatggcaaggtgtgcccattctgcacaatgaggattcacgatgttgaaggcatggcaccttccggttgcaccctttatcaaggtgcaacaggaccgactgtttattactctgtggttaagcggtgagtcgctgccgcagcggatcacgctgcgcgcggaagaggataacgaagagctgtcgctgccgatgcagcggctccgccaggcgccgcagccaggcgtggtggcatggcgcggcgaaatctctctcgccagcggccagccgcgccgccgctacagctttaagctgctgtgggccgaccatcagcgctggtttacgccacaaggcttcacccgattcccgccggcccgactggagcagttcgccattgacctgccggacgccggcccgcagtgggtggccgatcaggtgttctatcaaattttccccgatcgctttgcccgcagcgccgcgcgtgacgccgaccaggatgcggtctattaccatcacgcggcgggacgggagattgtgcgcaaggcgtgggacgacccgcttaccggcgaggcgggcgggtcgacgttctacggcggggatctcgacggcatcagcgaaaaacttccctacctgaagcagctcggcgtaaccgctctgtatctgaatccggttttcgccgcccccagcgtgcataaatacgataccgaggattatcggcgcgtcgatccgcagtttggcggcgacgcggcgctgctccggctgcgccacaacacccagcgggcgggaatgcgcatgatcctcgacggcgtgttcaaccataccggcgattcccatccctggttcgaccgtcaccagcagggcagcggcggcgccggccacgatccggactccccgtggcgcgactggtttaccttctcagaggaggggcaggcgcacaactggctgggctatgccagtctgccgaagctcgactatcggtcgaccagcctggtcaacgagatctatgccggtgaagacagtatcgtacgccactggctgaaggcgccatggagcatggacggctggcgtcttgacgtggtgcatatgctgggcgaaggcggcggggcgcggaataacctgcagcatatcgccggcattacccaggcagcgaagcaagcgcagccggaagcttttgtctttggcgaacattttggcgacgcgcgccagtggctgcaggcggatgccgaagacgcggcgatgaactatcgtggcttcaccttcccgatctggggattcctcgccaataccgatatctcttacgatccgcagaaaatagacgcccagacctgtatggcgtggatggataattatcgcgccgggctgtcgcatcagcagcagctgcggatgttcaaccagctcgacagccatgatacggcgcgttttaaatctcttcttggcaaagacgtagcgcgcctgccgctggcggtggtgtggctgttcagctggccgggggtaccgtgcatctactatggcgacgaggtgggcgtggatggcaataacgatccgttctgccgcaaaccgttcccgtgggatccggcgctgcaggatacccagctgctggcgttgtatcagcggatggcgaaactgcgtaaggcccaccaggcgctgcgctacggcggctgtcaggtgatttacgccgaggataacgtggtggtgtttgtccgcgtctacaaacagcagcgggtgctggtggtgattaaccgcggggaagcctgcgaggtggttatcgaagattccccgctgctgaacgtggccgggtggacgctgcaggagggcgccggcgccttccaggacggggtgctgaccctcccggccatctccgccaacgtctggtccggccgttaatggtagagctggctcagcaggtcgccgcggaggagcgcctcccgccaccagcgctgagccagcccatcattcccgctgcgccaggccatataggtaatatccttttcccgccagcaggcgacgcttttctccaccagactgccttttaccagccacgggcgagcgatatggcgcggcagaaagccgcagcccagcccggcgcacaatagttcgactttactggcgaaatcatcgacgccgatttgcggctgctcgtcgaggagattgctgttgagcggatggcaatagcgggcgctgtcgcggatcacgatggcccgatgctggctgagctgtttattggccagtggctccttcgcctgagccagcgggtgatggggggcgacgacgaagatgttatccaacgcgccgagggtttgccatgaccactccgcggatgtgggcggctcattgatggcgccgaggataatatccgccccatgatgggtcagctcttcccacgaaccggcgagggtgtgatggctgaagttcagtcgcgtctgtgggttttgcgcgtaaaactcggcgatcagcggcagcagggccgaaaagggaaatgaggcgtcaagggcgatggctagctctcgctcccagcccgcgctcagctgctgggcctgcttttccagatctctggcggcacttaaaagctgtcgccccttctccagcatcagccgcccggtatcggtaaattttgcccgatggccggaacgatccaacagcacgatgttcagatcgctctccagtttctggatcatatagctcagagcggcgggggttttatacagcgactccgcggcggtggcgaaggatccgtggcggtcaagggcatcaaggatcatcaaaacatcaaagtttacgcgcatatgaagctatccattaatttgttttctctgttgtacctaagcgcaataatcaaagccagtgaataaatcagaacagtttggcgtaaaaatttgattaaaacaggcgtgaataaatcctggtcgcggcaaaaaatataaaccataaaaaatccttaataacttgttagaaataactggctatactcaccatgctttatcagtcaggatccacacgacgcattaatcatcatgtcatctttttaactaattgattaagaaggtatttaatgtctattcgtgaactgctcgatcccactaattccgcgcttatctttattgaccatcagccgcaaatgtcctttggcgtggcgaatatcgatcgccagaccctgaaaaataacaccgtggcgctggcaaaagcgggcaaaatttttaatgtaccggtgatttatacctccgtagagaccaaaagctttagcggctatatctggccggaattattggccgtgcatcctgacgtcaagccgattgaacgtacctccatgaactcctgggaagacgatgcgtttgtggcagcggtgaaagcgaccggccgtaaaaagctggtgatctccgctctgtggaccgaagtctgcctgaccttcccggcgttgatggcgctggaggcgggctacgaggtctatgtagtgacggatacctccggcggcacctctgtcgacgcccatgagcggtctattgaccggatggtgcaggcgggggcggtgccggtgacctggcagcaggtgctgctggagtaccagcgcgactggtcgcgcaaagcgacctacgatgcggtaatggacctggtgcgcgaacacagcggcgcctacgggatgggcgtcgattacgcttataccatggtgcatggcgcgccggagcgtaaagcgtaaatcactccatccttcaggctgctgcgttgttggctgcgtttgtccgtccccagctactgaatttattcaagttcacggggacgtgcccgcctgccgcttcaacgcagcatgaaggatgttgtgtcagatcatttatggagagtggcaggagaaaaccggccatttccctgaagcaaggaactcgtcatggcgcagcaaaaatcggtgaccctggttatcagccatctgctcgatccgcaacacagccagcgctacgaagagtggctcggtaaaattatgcccattgcggcagaatttcccggccatcttggggcgaatgtgatccggcccgccgcagggcagaatctgtggagcgtcataatccgcttcgataccctggagcacctctacgcctggacgcagtcggaaacccgtcggcaactggtggctgagattgccccactgctgacggaaggcgatcggactgaggtgcggactgaaccggccttctggtttaccccgccgacggtgaacgtacgccagccgcggcgctggaaacagtttctgatcaccctgctggtgattttccccagcaccaacctggtgcctgcggtgaccggcatgctgctgccgtcgcttaaggggagcctgctgctgcacctcatcaatgatgcctgcgtggttgcgctggtggtctggttctggatgcccatcgtgacccgcctgtttgctggctggttgaagaaaaactgagtcagcctcctcaaggagtgcgttatgtcgcaaactgccacactgattctgacccacggtcagattcataccctcgatcgtgcgaatcccctggcggaagccgtggccatcgccgacggaaaaattgttgccaccggaagtcacgatcggatcatgagctttgccgccgaggggacgcaaatcgtcgatctcaaagggcatacggtgatcccgggcctcaacgattctcacctgcacctgatccgcggtgggttgaactacaaccttgagctccgctgggagggcgtcccctcgctggcggatgccctgcgaatgctgaaggatcaggcggatcgcacgccgtccccgcagtgggtgcgggtggtcggcggctggagcgaatttcagttcgccgagcggcggatgccgaccctggaagagctgaacgaggcggcgcctgatacgccggtgtttgtgctccatctctacgatcgcgcgctgttgaaccgtgcggcgctgaaagccgtgggatataccaaagagacgccggatccggcgggcggcgagatcgtccgcgatagccacggcaacccgaccgggatgctgatcgccaaaccgaacgccatgatcctttacgctacgctggccaaggggccgaagctgccgctggatctgcaggtgaactccacccgtcaatttatgcgcgagctgaaccgactggggctgaccagcgccatagacgccggcggcggcttccagaactatccggaagattacgaaattatcgaacagctgcacgcgaaagatcagatgaccgtgcgcatcgcctacaacctgtttactcagcggccgaagcaggagctggaggatttcgaacgctggaccgacatgctgaagccggggcaggggactgacttctatcgcgccaacggcgccggcgagatgctggtattttcggcggcggattttgaagatttcctgcagccgcggccggatctgccgcaaggcatggaggatgagctggagcgggtggtacgccatctggtggagcatcgctggccgttccgcctgcatgccacctacgatgagtccatcagccggatgctggacgtgtttgagaaggtgaaccgcgatatcccgtttaatggcctgcactggttcttcgatcatgccgagaccattaccgagcgtaacattgagcgggtgaaggcgctggggggcggtattgcggtgcagcatcggatggccttccagggcgaatattttgtcgatcgctacggcaaagaggcggtgaaacataccccgccggtagcaaagatgctggcgctggacgtgccggtggggctgggcaccgatgcgacccgcgtcgccagctataacccgtggaccgcgctgtactggctggtctccgggcgcaccgttggcgggatggcgatgtatgacgacgccaaccgcctgccgcgcgatgtcgcgctggagctgtggacggcgggcagcgcctggttctccagcgagcagggcaagaaaggccgtctggccgccggtcagcttgccgatctggtggtgctgtcgaaagactacttcagcgtcgcggaagaggagatcaaaggcattgagtcggtgctgacggtggttgacggcaaagtggtgtacgccgccggtcacttctcgccgctggcgccgccgcctattccggtgctgccggagtggtcgccggtggtgaaggtcccgggccattaccgttccgctccgccggcgacggctaaaatcggcgccatggtgcagatgcaccagtgctgcggtagctgtggcgtccacggccatcagcatgatattgcgcgtaagtcgtcgattccggtctctgacgagcaggccttctggggcgtgctgggctgttcctgctttgccttttgatacctgacgccaccgccccggcagcgtcggggcggtggtttcagccgcaggcccggtgtcaatagcgctgctctgagccaaagagcgccatgcggcgggcaatcatctcgcgtaccggctgcagtccctgggcgatgactttccgcggatcgttcacatcgtgtccggtgtcggcggcgaaaattgctttcacctgttggcaccaggcgtacatattttcggtattaacgttaatcttggcggtgccgcaggcaatcgcccggcgcatatcctcatcggcaataccggtgccgccatgcagcaccagcggaaccttcacctgctcggcaatggctttcatctcggtaaatcccagtcgggctttacctttatacagaccatgggtggagcccagcgcggcggcgaggcaatccacctgggtttctgtcaccagggtgtagcactcctggggatcggcgtagatgacttcggaattgacaatgccgtcttcactgccggcgatggtccccagttcggcctccacagagatacctttgctgtgggccagcgtcaccaggtggcgggtaatggccaggttttccctgaacggcagatgcgagccatcaaacataatggaactgaagccggcggcgatcgccgcttcgcaggcctcccgggaggtgccatgatccagatgcagcgccaccggaacatcaatatgcaaatactccatggcgttaaccacaatgtcatgaatacattttaacccgagcatatgcttaaccgtgccgccggacacccccaaaataaccggtgagcggcactgctgggcggtgcttaatacggcgccgacccattccagattattaatgttgaactgaccgacggcgtagccgtcccgcagggcatgctgaagcatgtccttcatcgacactaacatattcacctcttgatatttattaaatgcagttattcttcaaaatattgcgttaagtttctctcgtagctatttaacgagtggtggacgaccgccaggtcaggcatcgattcccgaaccccttttttctcaatagaaatggcggcggtcaggctggcaaataaaataatgttatcgatatgccatgagtaatggacgccataggtgaaggcgccgtgaaatacatccccggcgccggtggtatcaacggcattgcacagccaggacgggacgatctgcagcataccgctttttaaaaaagcgcagcctttttcgccaagggtaataaatgcttcaccgcggcaaattttattcaactcaatcagggccgctttaatttctgcttcggtgctcagcgagcgatagctcatataatcgcgggcgaaatgttcgctcactacaaaatagtcagtccaggccgccagtttaatattgctggcgcgcagtgacccgccgtccatcacgaccctggcgttgggcagtttcttaattaaatattcactgatttccgcctcatggccgtcaattaaaatggtaaccggctcctcgctggcaatcagtcgctcggcgaggtcgtccagtttgagcttttgctcgtaggtcagggaaggcggcgtttgcatcttgcgggtaataatcgtccgcgaacccgttaagcgattgaccagcaccgaggccagcggggtgatcatgtcatcggagaaaaccacctggctggtatccacccccgcctcggcaaactcatcgataatgcgctgaccgtaaaggtcctgctgcagatgaccaatgtaataaacctcctcgccccataatcccagcagccaggccgcattggccgccggaccgccgccgctttcaataaaatcatgacaaaagtttttggtattctcctggggccattcattgagaaagaaaaactgatcgaaacaagcaaatccaatggacaaaatagccataaccactcctgattatttgtcagcggcggaaagcgtggccctcccgccgggaaaaatgacctcgcttattcatttttctgcttcgccgtaagctcctcatagctgagcgtgttgcccaccacctggacgtgacggaagcagaaaggcgccagcagcgcgacgagcagcgccagacaaatcagatagatagtgatctgaccaaactgggtgaacgcattcccgataatgatgccccataccgcgaagtcgaaatcggcgaaggtgctgttttcaaacccgaggttgccgagcgccggcagcagcatcgccggcaggaaggccaggaagatcccgccgataaaggaggcgatgatacatccgcgcttaccgcccagtttgtcggcgaagacgccggacgtgccgccgcagaagaagtgcggcaccatgccgggaataatcagcgccatgcccagcccgccgagcaagagcatcccgaccagcccgcccacaaaggaactgatgaatcccactaccaccgcggtggggctaaaggtgaagaacaccgcgcagtcaacggccgggatggaatccgggatcagcttctggctgatgccctggaacgccggcaccagatcgccgaggatcagccgcacgccgttatagacaatggctacgccaacggcgaactgcagaccggtcagcaccgagaagatcagcatgttttggtcggtgatggtgctcaggtacgccgacccggcgacagcgctgcagacaaagtagataacaaacatcacgataccggtggtgaccgtggtatcgcgcagaaagccccacttttctgaaatttcggtatcggcgaaggaatttgccggattgccggtccggctggcgatccatgccgagaggtagtagccgagagagccgaaatggcccatggcgatcccgccgtcttcggttacctgcctggtgtaacgctgaccgatggccggggagatggccgaccatgagcccaacaggaatccaccgatcaggatcaacatccagccctggaactccgccgcctgcagaacggcggagaacaggcaggcgagaaagaacgaatgatggccggtcagaaagatatatttatacttggtacagcgggcgataatcagattgaaaataaagcctaacagtaaaatactcatggtttccacgcccagcattttctgggcgacggagacaatggcttcattgttcggaataacgccgcggatattaaatccggcctcgataataccgcccagcggattgagattggcaacgataacgcctgccccagcgctcaacatcaaatagcctaaaatcggctttaatgtgccggtaagcagtttgttaccgggggagcgcagcgccactaaaccaacaaaggcgataagccccattaaaaaggcgggttgactgaatatttccgttaagaaactaagaatagcctgcatggtcgttccctctatgctgattaagagtgagtcgcagcaattttcatcagcgcgtcggtaatatcctcggcgatcttcgctttatggacgtagctgcgaatgatggcgacatgacagtgggccggaaattgatttgccagttctttgatcgtgacgtaaaggtcggctttttccccgacggcgttagcaaaatcgaccgaggcgacgtccgctttgatgcctaattcgtcacaaatctttttcacattattcgcagccatcaatgagctgccaataccgttaccacaaaccgttctgataactaacataatgactactccatttgtttttgaatgaaatgtaagactgaattaacgtcattttcctgctgaagaaaggtcacaatatctgactcgatcagcgaggctatcagttggatcattttgatatgactgtcagcatcggcgccggcgatcgcgatgaccacggaaaccggatcgaactcatcgtggccgaaggagattggcgtggcggtggtgacaagtgagaacccggtctgtaatgcccctttttccggccgggcatgcggcatggcaatcccgtcatctatcacgatggcggcgccaaaatcttcatataccgtcagcatctcgttgacatattcggcgctgcaaatctggcgcctggcaagtaatgaacccgccagttcgatggcctcttccgcacgggaaatattctgcttaagggcgattaacgacgggtcaaaaataatttccatcctcagctcctgaacgtattcctgttcctgagttaaatcatgaccaaatacattgatgaaaatgatggatgagatcacatccgcggttttaaatattgatggggatcacatcgacggcaaagtaccggcagaaaacgatataaataatttatatgtttttcagtctgttatgaaggctttgtattttgacgctgaaatttgccagagaaaaagtgagaggtaaagcgaattttttcgccagaagtttatctctggtcacaaatatcggcgggtcattttcttaaattttgacgccgctaacaaaaaaggcccgcctgagcgagccttttattaaaacgcgtgccgattacaggctggaaacgttttcggtcaggtattttgcaacgccttccggagaggcggccataccttcttttcctttttcccactgcgccgggcagacttcgccgtgctcttcgtggaactgcagggcgtctaccatacgcagcatttcgtcgatgttacggcccagcggcaggtcgttaaccacctgatgacgaacgatgccgttggcgtcgatcaggaaggagccgcgcagcgctacgccttcgtccggatgctcaataccgtaagctttctggatttcacgtttgatgtcagcaaccatcgcgtatttaaccgggccgataccgccctggtctaccggggtgttacgccatgcgttgtgcacgaactcggagtcgaaggaaacgccaaccacttccacgccgcgtttctggaattcttcgtaacgtttgtcgaacgcgatcagctcagacgggcacacgaaggtgaagtccatcggccagaagaacagaacggtaggtttaccgttggtgtgctgtttgaaattgaatttctcaacgatctcaccattacccagcacagcggctgcagtaaaatccggcgcttgacgagtgaccagaaccatttgattctcctgtaattactaaggttatttggaacgcaacgcgggcaagtatagagcctgcccggcaataacacaaagaggcgctaacaatcgttcagccagtttttacctatcaatgacgtggctattacagctgtttgttttctgcctggcgcatcatctgcggataaaagcgccagaactgcgtctccagacggtcgtaatgggtatccagatcctgccaggagtcgcgtagcgcctcgagacgtggacggcggctggccatgccgttcagcacgcgctgaataaaatccatttcccgatagcgctccagccagcgctccgaccacagatattgattgagattgacgaagcggggcggcgagtcgggcaggatggggacgatctgccgctcggcgtagcgtacgaactcgtccagcggcaggtcaggggagagctgcgtccagtgctgggacaggaaatgatcccacatgacgtcgagggtgatgggggcgacgcggcgggtctgcgggcgaaaccactcccgcgcctctttgacttccgccaggttgtcagtcatcacgtcaatccggcgatgcatatagatgccgtcgatgatctccgccggatagtcgccctgcgggttgccgcgcacgaagtcggccatcaggttgccgggcagcgaactgtcggcgagatgggccaggtgcaggtgggcgagaaaattcataaaacgacatcctttaaatacgagcgggcaggtggaaacaccgatgttgcgctgaacgccgcctcggtggccgaatggcatgctgtcttgccgcgcgcggcacctttgccaccggtaaggcattcggttgccgcatggcggcattcggaatgatttggaatatagattatgtcattcatccggaggggtaaaggttgcagccagaccgccccggcactagactacccgcctctttattcagtctgagttaccgtcatgcgcgttaccgattttgcttttgaactacccgaatctctgatcgcccactatccgatgcctgagcgcagtagctgtcgcttgctctccctggacgggccgacgggcgcgctgacgcatggcaccttcaccgacatcctcgataagctcaatcccggcgatctgctggtgtttaacaacacccgggtgatcccggcgcgtctgttcggccgcaaggccagcggcggcaagattgaagtgctggtggagcggatgctggatgataagcgcatcctggcccatattcgcgcctcaaaagcgccgaagccgggcgccgagctgctgctgggcgatgacgagagcattaaggccacgatgctggcgcgccacggcgcgctgtttgaagtggagtttaacgacgagcgcccggtgctggagatccttaacgggatcggccatatgccgctgccgccctatattgaccgcccggacgaagacgccgaccgcgagctctatcaaaccgtctatggcaccaggccgggcgcggtagccgccccgaccgccggtttgcatttcgacgaaccgctgctggacaaactgcgcgccaaaggcgttgagatggcgtttgtcaccctgcatgtgggggcgggcaccttccagccggtgcgcgtcgacagcattgaagagcacaccatgcactccgaatatgccgaagtgccgcaggaggtggtcgatgcggtgctggcggcgaaagcgcgcggcaaccgcgtgatagcggtgggcaccacctcggtacgttcgctggagagcgcggcgcaggcggcgaaagacgcgctgatcgcgccgttcttcgacgatacgcagattttcatctacccgggttatcagtaccaggtgatcgatgcgctggtgactaacttccatctccctgaatccacactgattatgctggtgtcggcgtttgcgggttatcagcacaccatgaacgcctataaggtggcggttgagcagaaatatcgcttttttagctacggggatgcgatgtttatcacgtacaatccgcaggctatttctgagcgtccctgaaaaggccggtacgccggcttgtagacgccataacgcattttttagctacggaatcattccgtggcgagtatgaaaacgtcggactgtttttctgacgcaggagcaagcatgaaatttgaactggataccaccgacggtcgcgcccgccgcggtcgcctggtgtttgagcgcggcgtggtggaaacaccggcctttatgcccgttggcacctacggcaccgtcaaagggatgacgccggaagaggtggaagccaccggcgcgcagattattctcggcaacaccttccacctgtggctgcgcccgggtcaggagatcatgaagctgcacggcgatctgcacgattttatgcagtggaaaggaccgatcctgaccgactccggcggtttccaggtgttcagccttggcgatatccgtaagatcaccgagcagggcgtccacttccgcaatccgatcaacggcgatccgattttcctcgatccggaaaaatcgatggagattcagtacgatctcggctctgacatcgtgatgatcttcgacgaatgtacgccgtacccggcggactgggattacgccaagcgctcaatggagatgtctctgcgctgggcgaagcgcagccgcgaccgtttcgatagccttggcaataaaaatgcgctgttcggcattattcagggtagcgtttacgaagatttacgcgatatctcggtgaaaggtctggtagagattggctttgatggctacgctgtcggcggtttggcggttggtgagccgaaggaagacatgcaccgtattctggagcacgtctgcccgcagatcccggccgataaaccacgatacctgatgggcgtcgggaagccggaagatctggtggaaggggtacgtcgcggtatcgatatgttcgactgcgtcatgccgacgcgcaacgcgcgtaacggccacctgttcgtcaccgacggcgtggtgaaaatccgcaacgcgaagcacaaaagcgataccgcgccgctggacgccgagtgtgattgctatacatgtcgcaattattcacgcgcttacttgcatcacctcgaccgttgcaacgaaatattgggcgcgcgtctcaataccattcataacctgcgctactatcagcgtttaatggctggtttacgcaaggctatcgaagagggtaaattagagagcttcgtgaccgatttttaccaacgtcaggggcgcaccgtgcctcctttgaacgttgattaattttaataatgagggaatttcaatgagcttttttatttctgatgcggtagcggcaacgggtgcaccggcgcagggcagcccgatgtctctgattctgatgctggtggtgttcggtctgattttttacttcatgatcctacgtccacagcagaagcgcaccaaggaacataagaacctgatgaactccatcgccaaaggtgatgaagtgctgaccaacggcggtctggtcggtcgcgtgaccaaagtagcggaaactggctacattgctatcgcgctgaacgataccactgaagtggttatcaaacgtgacttcgttgctgccgttctgccgaaaggcaccatgaaggcgctgtaatctaacttttcccaaagggaactgccgtgttaaaccgttatcctttgtggaagtacgtcatgctggtcgtcgtcattgtcgtcggcctgatctatgcgcttcccaacctgtatggtgaggatccggctgttcaaatcactggcgcgcgcggcgtcgccgccagtgagcaaacgctgatccaggtccagaaaactttacaagaagaaaaaataaccgcgaagtctgtggcactggaagagggcgctattcttgcgcgcttcgacaccactgatacccagctgcgcgcgcgcgaagcgctgcttaacgtgctgggtgacaaatacgtcgtggcgctgaaccttgctccggcaaccccacgctggctggcggcgctctatgccgagccgatgaagctgggtcttgatctgcgcggcggcgtgcacttcctgatggaagtcgacatggacaccgcgttaggcaaactgcaggaacagaacatcgatagcctgcgcagcgagctgcgcgacaaaggcattccttacgcgaccgtgcgtaaagaagacaactacggtctgagcatcgtcttccgcgacagcgcggcgcgcgaccaggctatctcttatctcagccctcgccatcgcgatctggttatttcctctcagggtgacaacagcctgaaagcggtgatgaccgatgagcgcctgaaagaagcccgtgagtacgcggttcagcagaacattaatatcctgcgtaaccgtgtgaaccagctgggcgtcgccgagccgctggttcagcgtcagggcgctgaccgcatcgtggttgagctgccgggtatccaggataccgcgcgtgcgaaggaaatccttggcgcgaccgcgaccctcgagttccgtctggtcaatactaacgtggaccagtccgccgccgcctctggccgcgtgccgggcgactcggaagtgaagcagacgcgtgaaggccagccggtagtgctgtacaagcgggtgatcctgaccggggaccatatcaccgactcgacctccagcatggatgagtacaaccagccgcaggttaacatctcgctggacagcgcgggcggtaacatcatgtctaacttcactaaggacaacatcggcaagccgatggcgaccctgttcgtggagtataaagacagcggtaagaaagacgctaacggtcgcgctatcctggcgaaagaggaagaggtgattaacatcgccaacatccagtcgcgtctgggtaacagcttccgtatcaccggtatcagcaatccgaacgaagcgcgtcagctgtcgctgctgctgcgtgccggcgcgctgattgcgccgattcagatcgtcgaagagcggactatcggcccaaccctgggaatgcagaacatcaagcagggtctggaagcctgtctggccggtctggtggtctctatcctgttcatgatcctcttctataagaagttcggcctgattgcgacctcggcgctgattgccaacctgatactgattgtcggcattatgtccctgatcccgggggcgacgctgaccatgccgggcatcgcgggtatcgtgttaacccttgcggtggcggtcgatgctaacgttctgatcaacgagcgtatcaaagaagagctgagcaacgggcgtaccgttcagcaggcgattgacgaaggttatcgcggcgcgttcagctcgatcttcgacgccaacgtgacgacgcttatcaaagtgatcatcctgtacgcggtcggtaccggtgccattaaagggtttgcgattaccaccggtatcggtatcgcgacctcaatgtttaccgctatcgtcggcacccgtgccatcgtgaacctgctgtacggcggcaagcgcgttaaaaagctgtctatctgaggagtgcgttgtggcacaggaatatactgttgaacaattgaaccacggccgtaaagtctgggactttatgcgctgggactactgggccttcggcatttcaggttttctgctaattgtgtcgatcgccatcatcggcgttcgcgggtttaactgggggctcgatttcaccggcggtacggtgattgaaattacccttgagaaaccggtcgatctggaccagatgcgcgattccctgcagaaagcgggctttgaagagccgcaggtgcagaactttggcagcagccgcgacatcatggtacgtatgccgccggtgcatgacgccaacggcagccaggagctgggcagcaaggtcgtgacggtgattaacgaatcgaccagccagaatgcggcagtgaagcgtattgagtttgtcggcccgagcgtcggggcggacctcgcgcaaaccggcgccctggcgctgattgcggcgctggtctgtatcctgatctacgtcggcttccgcttcgaatggcgtctggccgccggggtggttatcgccctggcgcacgacgtggtgatcaccatgggcgtgctgtcgctgttccatatcgagatcgacctgaccatcgtggcctcgttgatgtcggttatcggctactcgctgaacgacagtatcgtggtatcggaccgtatccgtgaaaacttccgtaagatccgccgcggtacgccgtacgagatctttaacgtgtcgttgacccagacgctgcaccgtaccttgatcacctctggtaccactttgatggtgatcctgatgctgttcctgttcggcggcccgattctggaaggcttctcgctgaccatgctgatcggtgtttccatcggtacggcttcctctatctacgtcgcctccgcgctggcgttgaagctgggcatgaagcgcgagcatctgatccagcagaaggttgagaaagaaggggcggatcagccgtctattctgccgtaatccggttcagttgagataaagctatcccggcccttgcggccgggatttttttgcccgcgacaaaacctgctgacagtatgctgtcaggagccctcccatacactgcctctgaactcactaacgagcaggaggaagtatgaacaacgtgattaactggtttgaaattccggtcgccgatatggatcgcgccgtcgcgttttatgagccggtgatgcaagtgtcgctgcgtcgcgaaaccatggactgcgccgagctggcggtgttcccgcatcaggatccggcccccggcggcgcgctggccaaatttgaaggtatcgcgccctcggcgcagggcgctattatttatctgcatactgatcatcttgccgccacgctggagcgcgttgcctcggcgggtggggcctgtgtcttcggcccgctgacgctgccgaatgatattggcaccatcgccctgtttaccgacagcgagggcaaccgcgtcggcctgcaccagccggcttaaccttaacttttgtgaagtgagacatgacccgacgcgccgaccgtttatttcagattgtgcagatcctgcgcggcaggcggctcactaccgccgcgctgctggcggagcggttgggcgtgtcggagcgtactgtctatcgcgatattcgcgatctctccctctccggcgtaccggtggagggcgaagcgggcagcggctaccggctgctggcgggctacgatctgccgccgctgatgctgaccaccaaagaatccgaggcgatgatcgctgcgattcggctgctaaaaacctggggcggtgaggcgctgtcgcagtcgctggagtccgcccaggaaaaaatgctggcgatcctgccggaggcgcgtcggcgccaggcggagcagactcgcctgtttgcccctgaccttggcgcgcatcgctatgctaaaacccattttgacgttatccaccaggccgtatccaatcagcaggtattacagcttcactaccaggatgaatccggtcaggtgacgtggcgtgaagtgctgcccctggggctgtttttctggggcgaacgctggctgttggtggcctggtgcgaactgcgcaatgattaccgcaattttcgcctcgaccgttgtctggaggtcagaaggaccgaacgtcgattcagcgagtgcgccgaccgctcgttaagcgattttctgcgcaaggtccggtgcgaggtgcgggagaaataaaaaagcccgggcagcaggagctgcggcccgggcgctgtcttgctgtatcagcaatcagaagttgtagccgaccacgaagtaaccaccccagccggtcgagcgaacgctgaacggaccatcgccgaagttcagcttcgcatcatcagcccactggccgccgttatggaagtaacgggcgacgatagagtagtgccagtgcgcgtagttcagcgccaggatgtggctggaggcgatagagttgctggtgcgcgcgtgcttcccgttcagatcgtagaagttgtcatcgccgaggtcagaaccccagtcgaagttggtgaagccgatgtagctcagcgaaccgccccacaggtcggtcagcggcacaaagtatttcactttgaagcgatagccgtcccattcgttttcgttggaggcgccgtagttctgccactggtacttggcgtagacgttcagcgacaggctcattggcaggccggtatcgatatcggtacccagacccatataccaggtgctctgctcctgggagtcgttgcggcccatatcgtagatatagttgttggcgaaataccattctttgaaaggcccgaagctcaggtcggtattggtcagcttatcgatagagaaacgcggttcgatctccataaacagcggggaacctttgttccagataccttttgccgtgctgttgccgccgaagaataccggggcatcaatatagccgtagaaatcaaaccagtcttttttggcgaacgcttcgtattccaggtaggtatcgttacggatctgcggtccaaaacgggtgtggtagctgcccaccacgttaacactctggtgccaccagtcagacagatactgcggtttgtcgttttctgccgcgcccgcggcaaaagtagtggagagcgccacaaccgcacccgctgccagtaatgtttttttcatagtaatgccactgtttaaattgagcctgaaggcgttaaaagaagtgccgaagcgtttctaaatatttcgtctttctgtgggggtctattataggaatcattgctcacaaaaatacgtgttgtttcacataaccagaacatgcgtaatcgattgcgttcacgattctatgcatttcttgacaaaatgctactgaaaatcgcgctgcagaacgatttctaatgaactcttgcgaaaagttgtaagtggataagaaagacggggcaggaggtagccgggcggggcaggcccggctgaaggcttactgggcggcggcgggctggatatcgtgtacgcgaataaaaccgactttatctggcgttacattgaggcgcaacgggatatcgacatcgctgggggcgagggtgctggccggcgcgctaatcagctgatcctgaacattgacttcctgatagctgtgggtggtgccggtgatctgtccggaagcgacggtggcggtaaaggccggcagcggatcgttggattcgccctgaatgcgtaaggtcaggcgtgacccatcgccatccggggtaatactgcccaccgacatgcgcagggtgccgatctggctctccagccgcgccggggtcttggcctccggcagcagatagacgccgcgggtggatttggcgttcagcgcgttttgctgggtgattttgatcgtttgctggttgagctgggtcatctcctggctcagcgtactcacgctctggtgcatctggcggatttcgctttgctgggcgcaggcggtcagggtgaacaggcagcccgcgatggcgagcttcaggtaacgtcttgtcatggtcaggattccgtttacagaggatgcttaatggtagccaacccggcctcatctcccatagatcctttgtctcaaaagctctttctttgtagtccggtcacttcgcggtaaactactcttcagtttaactacctgtcaggacgcgctatgcattgccctttctgtttcgccgtggataccaaagtgatcgactctcgtctggtgggggaaggctcttccgtgcgtcgccgtcggcagtgcctggtctgtaacgaacgctttaccaccttcgaagtggcggagctggtgatgccgcgggtggtgaagagtaacgatgtgcgcgaacccttcaacgaagacaagctgcgcagcgggatgctgaaagcgctggagaaacgtccggttagcgccgacgacgtggaaatggcggtcaaccatatcaagactcatctgcgcggcaccggcgagcgcgaagtggccagcaaaatgatcggcaacctggtgatggagcagctgaaaaagctggataaagtcgcctatattcgcttcgcgtcggtctatcgcagcttcgaagatattaaagaattcggcgaagagatcgcccgcttacaggactaagccatgcaggacgaaatgtacatggcgcgtgcgctgaagcttgccgcgcgcggtcgctttactacccatcctaaccctaacgtcggctgcgtcattgtgaaagacggcgagatcgtcggcgaggggtttcactatcgcgccggcgagccgcatgctgaagtgcacgccctgcgcatggctggcgaaaaggcgcgcggcgccaccgcctacgtcactcttgagccctgcagccaccatggccgtacgccgccatgctgcgatgcgctgattgccgccggcgtcagccgcgtggtcgccgcgatgcaggatccgaacccgcaggtggcggggcgcggtttgtatcgcctgcagcaggccggcattgaggtcagccatgggctgatgatgaacgaagcggaagcgctgaataagggctttctgaagcggatgcgcaccggttttccctgggtgcagctgaagctgggcgcctcgctggacggccgcacggcgatggccagcggcgaaagccagtggatcacctccccgcaggcgcgacgcgacgtgcagcgtctgcgcgcccagagccatgccatcctgaccagcagcgccaccgtgctggcggacgatccggcgctgaccgtgcgctggcaggagctgagcgccgatacccaggcgctttatcccgaagagaatttgcgccagccgctgcgcgtcgttatcgacagccagaaccgcgtcacgcctgagcatcgtattgtgcagcaggcgggggaaacgctgtttgcccgcctgcgcgccgatgcacggcagtggccggaaagcgcccgcacgctgctggttccggagcataacggccatctcgatctggtgctgctgatgatgatgctcggcaaacagcagatcaacagcgtctgggttgaggcaggggctacgcttgccggggcgctgctgcaggcgggtctggtcgacgagcttatcgtctatattgcgcctaaactgttaggcaatgcggcgcgtggattatgcgcgctgccggggcttgaagagctgagccaggccccccattttaaattcaatgagatacgtcaggttggcccggatgtctgcctgcatttaaccactgcgtgaggctttcctgattattaggaagcagcgctcagaataatatgataaaatccgccccccttgcggggcacatgaacccgaaggaagagtatgaacattattgaagctaacgttgctaccccggacgctcgcgtcgccatcaccattgcgcgtttcaacaactttatcaatgacagcctgctggaaggcgcgattgacgccctgaaacgcattggtcaggtaaaagatgaaaacatcaccgtcgtttgggttccaggcgcgtatgagctgccgctggcggctggcgcactggcgaaaaccggtaaatatgacgcggtgatcgcgctggggacggtgattcgcggcggtaccgcccactttgaatatgtggcaggcggtgccagcaatggcctggcgcatgtcgctcaggacagcgaaatcccggtagcctttggtgttctgaccactgaaagtattgaacaagccattgagcgcgctggcaccaaagccggtaacaaaggtgcagaagctgcgctgaccgcgctggaaatgattaacgtattgaaagccatcaaggcctgatttttgtaaggggaattccgtgaaacctgctgctcgtcgccgcgcccgtgagtgtgccgttcaggcgctctactcctggcagttgtcccacaacgacatcgctgatgtcgaataccagttcctggcggaacaggacgtaaaagatgttgatgttctgtatttccgcgaactgctgtccggagtggcgactaacagcgcgtacctcgacggcctgatgaagccctacctgtcccgccagctggaagagctgggccaggttgaaaaagcggtgctgcgtatcgcgctgtttgagctgtccaaacgtgatgacgtaccgtataaagtggccatcaatgaagctatcgaactggcgaaaaccttcggcgctgaagatagccacaagttcgttaacggcgtgctggacaaagcggctccggtaattcgtccccacaagaagtaaactgcaggccgggttttgcgagggtcgcctcgcagcccggccttatttattattttgctgaggcataacgtatggcatgcggcgaattctccctgattgcccgttattttgatcgcgttaaaagcgcccgccttgatgttgaaaccggcatcggcgatgactgcgcgctcctgcatattcccgagaaaaaaacgctggcaatcagcaccgacaccctggtggcgggcaatcacttcttacccgatatcgacccggccgacctcgcttataaagcgctggcggtgaacctgagcgacctcgcggcgatgggcgcggagccggcgtggctcacgctggcgctgaccttgccggaggtggatgaagtctggctggaagccttcagcgacagcctgtttgtccagctggactattacgctatgcaactgattggcggcgacactacccgtggcccgctctccatgacgctgggtatccacggctttgtgccgccgggacgcgccatgaaacgcgctggcgcgaagccgggggactggatctatgttaccggcactccgggagatagcgccgccggtctggctgtactgcagaatcgtctaacggtggatgaaccgtctgacgccgactacctgctggcccgtcatctgcggccgatgccgcgcgtgctgcagggccaggcgctgcgtgacctggcgacatcggctatcgatctctccgacggcctgatctccgatctgggccatattctcaaagccagcggctgcggcgcacgtatcgatctcgatgccatgccgtactccgatgcgatgctgcgccaggttgattctgagcaggcgctgcgctgggcgctcgccggcggggaagattacgagttgtgctttaccgtaccggagctgaaccgcggggcgctggacgtggctcttggccatcttggcgcgcgttttacctgtatcggacagattgcgccggagagcgaagggctgcagtttatccgcgacggtaagccggtcgcgcttgatttaaagggatacgatcactttgcgtagtcgagacgaggcgcttagccgcctgagtatgcgtaatccgtggcatctgctggcgaccggctttggcagcggcttaagcccggtggtgccggggacgatgggctcgctggcggcgatcccgttctggtatctgatgacctttctcccctggcagctttactcgctggtggtgatgatgagcatctgtatcggcgtctatctgtgccatcgcacggccaaagatatgggcacccatgaccacggcagcatcgtctgggacgagttcgtcgggatgtggatcaccctgatggcgctgccgaccatggactggcagtgggtggccgccggcttcgtgattttccgtatcttcgatatgtggaagccgtggccgattcgctggtttgatcgcaatatccacggcggaatggggattatggtcgatgatatcgtcgccggcgtgatctccgccggcgtgctgtacatcattggccatcactggcccatcggtctgctttaaccgcctctccccggcaacgctacgctgccggggaaaccacgcccgtcacttaaatcccaccaccggatgcggctgatacggcgcctccagcttgtcgatctgttccgcggagagcgtcaaatccaccgcctgcagcagatcatcgagctgttcctgacgcgacgggccgataatcggcgcggcgacgccgggtttgcttaacagccaggcgagagcgacctgggcgcggctggcgtcgagttcttccgccacgtccgcgagattctcggcgatctgcgcatcgttttcttcactggcgctgtacagcgatttgccgaactcatctgagaccagccgggcggtggtctcaccccaggggcgggttagcctgccgcgcgccagcggactccacgggatcaccgctacgccgttacgttggcacaggggcagcatctcattctcttcttcccggtaaatcaggttgtagtgatcctgcatggtgacgaagcgcgcccagccgttctgctgctggagcgccagcgcctgggcaaactgccgggcatgcatggacgaggcgccgatatagcgcgctttgccggctttcaccacctcgtccagcgcttcgagcgtctcttcaatcggggtggtatagtcccagcggtggatctgcagcaggtcgacatagtccatcccgagacggcgcaggctgtcgtcgatggagcgcaggatctgcgcccgggaaagtccttccgccagatcgccgacctggtgatacaccttggtggcgacaaccacctcgtcgcggcgggcaaagtcgcgcagggcgcggccaacgatctcttcgctgctgccgtcggagtagctatttgcggtatcgaagaagttgatgccgccttcaatggcgtgctggataagcggacggctgctctcttccggaagcgtccaggcgtgcctcccgcggtccggctcgccgaaggtcatgcagccgaggcagagtcgggaaacacgtaaggcagtatcaccgagggggatatagtgcatagtgcgctcctgctattcatcgagggtatcccttaagcatagcaggagcggaaggggcaattatgccagccagtcgcggattttggcttcaataccggcggcatcaaggccgaggtcggcgcggatctcttcctgagtgccctgaggaataaaataatccggcaggccaatattgagcaccggtaccgcccggcgatgggccatcagcacttcgttcacgccgctgccggcgccgcccatgatggcgttctcttccagcgtcaccagcgcgtcgtgctcgccggccagctggaggatcagcgcggtatccagcggcttcacaaagcgcatatccaccagggtggcgttgagtttgtccgctaccgccgcggcttccggcagcagggtgccaaagttgaggatcgctattttctcgccctgacgtttcaccacccctttgccgatcggcagcgatgccagcggctcgagcgtcgcgccggtgccgctaccgcgcggatagcgcaccgcgcaggggccgttgctgtagtggtagccggtgtacagcatctggcgacattcattttcatcgctcggggtcattaccaccatatccggaatacagcgcaggaaggagagatcgaacgctccctgatgcgtctgaccgtctgcgccgacgatcccggcgcggtcgatagcaaacagcaccggcagcttctggatagccacatcgtggatcacctgatcgtaggctcgctgcaggaaggtggagtagatcgccaccaccggcttgtagtcgccaatcgccagcccggcggcgaaggtgaccgcatgctgctcggcaatggcgacgtcaaagtaccgatcggggaatttcttcgaaaactccaccatccctgaaccttcgcgcatcgccggcgtgatcgccatcagcttgttgtctttggccgccgtttcacacagccagtcgccgaagattttcgagtaggaagggaggccgccgctgcttttgggcagtacgccgctggtatggtcgaattttggcaccgcatggaaggtgatcgggtctttctcggcaggctcatagccgcggccttttttggtcataatatgcaggaactgcgggcctttcaggtctcgcatgttcttcagcgtgctgaccagaccgagcacgtcatggccatccaccgggccaatgtagttaaagcccagctcttcaaacagcgtgcccggcaccaccatccctttgatatgctcttcggtacgcttaagcagctctttaatcggcggcaccccggagaagacctttttgcccccttcgcgcagggtggagtagagcttaccggagagcagctgcgccagatgattgttcagcgcgccgacgttctcggaaatcgacatttcattgtcattcagcaccaccagcaggtcgggtttgatatccccggcgtggttcatcgcctcaaacgccatgccggcggtgatcgccccgtcgccaatgacgcacaccgcgcgccgctgcttatcctctttcgcggcggcgatagccaccccgatacccgcggaaatggaagtggaggagtgaccgacgctcagcacgtcatactcgctttcaccgcgccacgggaagggatgcaggccgcctttctgacgaatggtgccgattttgtcccggcgaccggtcagaattttatgcgggtaggcctgatggccgacgtcccagatcaggcgatcgaacggcgtgttatacacgtagtgcagcgccacggtcagttccaccgtgccgaggccagaggcaaagtgaccgctggaacggctgacgctgtccagtagatagcgccgcagctcatcacatagcttcggcaggctctcttttggcaacaggcgcaactcctgggtggaatctaccagcgccagggtcgggtatttggcaatatcaaaactcatcagagactcattttttgtttatttatcgcgctgaataatgtaattcgcgagcgcttccagtgccgaagtatccagagattgtgcggccagctcatctaacgaccggcgggcatcagcgatcaggtcgtgcgctttcttccgggcttgctcaagacccaggagggcgggataggtgcttttacccaattgctggtcggcaccctgacgtttgccaagggtcgcagtatcccctaccacgtcgagaatgtcatcctggacctggaaggcaagaccgatattttccgcatagcgatccagcgcgggcagggcagcgcggccgcgttcgccggcgctcagggctcccatccggacggcggcgcggatcagggcgcccgttttgtggcgatggatacgctccagcgcctgtaaatcaacctgctgtccctcggcctgcagatccagcgcctggccgccgcacatgcccgccacgccgctggcctgcgccagttcggaaaccatcgccagccggtcccggtcaggaacgtcgaccatcggcgcatcactcagtatagagaacgccagcgtttgcagggcatctcccgcaagaattgcgttggcttcgccaaatttaatatggcaggtcggcaggccgcggcgcagatcgtcatcatccatcgccggcaaatcatcatgcatcagggagtaggcatgaatgcattcgaccgccgcggcaggagcatccagcgtggtacggcacacgccgaacatctcgccggtggcgtagacaaggaagggacgcaggcgtttaccgcctaacaatgcgccataatgcatcgcttccaccagcggagtgttctgaaagggctgcggggcgatgaaacggcgcagcgcttcgtttgcctgttccacacaggcctgcaattgttgcgggaaatccatttattcagcgtccggcgtaaaaggcgtggtcggggaatcttcactatccgccagcaggatctgcacgcgctgttcggccttctgcagctgactttgcccctggcgcgccagctgtacgccgcgctcaaattcgcttagcgcttcctctaacggcaaatcgccgctttccagacggttaacgatctgctccagttcgcccagagcagtttcaaagctggccggggcctcatttttctttggcatagtgaatgtagactcttgttatgtcgcgacggcaataccgggtatggtaacgaagtcacgcgtgtaagcaaataacgcgcaatggtgatatactccgcgcccaggatgcaggcaccggtgtgcgctgctttacaacttttgcttatagccccgtcgggcttgccaacgaactattgtcgctatgaagtttatcattaaattgttcccggaaatcaccatcaaaagccaatctgtgcggttgcgcttcattaaaatcttaaccgggaacattcgtaacgttctcaaaaactatgatgagacgctggccgtcgtccgtcattgggatcatatcgaagttcgcgcgaaagatgaaaatcagcgcccggctattcgcgatgcgctgacccgtatccccggcatccaccatattctggaagtcgaagacgtgccgttcacctcgctgcacgatattttcgagcagacgctgccgctgtggcgcgaggcgctggaaggcaaaaccttctgcgtgcgagtgaagcgtcgcggcaaacatgaattcacctcaattgaagtggaacgttacgtcggcggcggtctgaatcagcatattgaaacggcgcgcgtgaagctgaccgacccggacgtcactgtcaatctcgagattgaaaacgatcgcctgctgctggtgaaaggccgctatgaaggcatcggcggtttcccgatcggcacccaggaagatgtgctgtcgctgatctccggcggctttgactccggcgtctccagctacatgctgatgcgccgcggctgccgcgttcattactgcttctttaaccttggcggcgccgcccatgagattggcgtccgccaggttgcgcattatctgtggaaccgcttcggcagctcacaccgcgttcgctttgtggcgattaactttgagccagtagtcggcgaaatccttgaaaaagtggacgacggccagatgggcgtcgtgctcaagcgcatgatggtccgcgccgcgtcaaaagtcgcggaacgctatggcgtgcaggcgctggtcaccggcgaagcgctcggccaggtctccagtcagaccctcactaacctgcgcctgatcgataatgtctccgatactctgatcctgcgcccgctgatttcgcacgataaagagcacatcatcgacctggcgcgtgagatcggcacggaagatttcgcccgcaccatgccggaatattgcggcgtgatctccaagagcccgaccgtgaaggcggtgaaggcgaagattgaagcggaagaagaacacttcgatttcagcatccttgataaagtggtagaagaggcgagcaatatcgatatccgcgagatcgcccagcagacggaagagacggtggtggaagtggaaaccgtgaccggctttggcgccaacgacgcgatcctcgacattcgctccatcgacgagcaggaagacaagccgctgaaggtcgagggggttgaggttgtttccctgccgttctacaagctaagcaccaaatttggcgatctcgatcagagcaaaacctggctgctgtggtgcgagcgcggggtgatgagccgtctgcaggcgctttatttgcgcgagcagggcttcagcaacgtgaaagtttatcgcccgtaacagattgttatgatgcaaaaggccttccctgatggagggcctttttactattggcaggggagtatattagcgcagggtcagcgccaggtcattgagctgatcgatgacaatattccagccctcgaaaaatcccatctgctcatgctgctcgcgggtttcatcatcggcatgcagcaccgtagccgtatagcgacacccgacctgttcatcggcaaaggtgatgatggccgtcatcgcgaagggggaaacggcggggcgataatccgccgtcagcatcgaggtcatgacgattttttgttgcgggataacctcaagaaaacagccggggttatcgctgcgttcaccgtcaggcccgtgcatcacggtgtgaaaggccccgccggcgcgaaaatcaaaggccagaacctcggtttgccagggcttagggcaccaccaggttcggagtaatgccgggtcggcccacgcgcgccacagggctggggcgggcgcgctgagcaggcggctgattacaagatcgcgagaatcggttgcgctccgggacatgctgcgactcctcaggaaaaggggagccagcccgcggcgcggaccggctatcaggcttcgtagtaattatagatgccagcggccatcaccagctgtgaggcgacctcatacgctttctcgcgccccaccagcagatcgatcattttcagggcgaaatcaatcgaagtccccggaccctggctggttaacagattcacccgcggatcccagaccactcttttatcctgccactgctcggcggggatatgttccttcagcgccggaaaaccggtcatgttgccgatcgggaacagattatggggtaccagcacggtcgccggggcggcgcagatggcggccacaatgcgcccagagagatgaaactggcggacggtttccaccagtagcgtgctgtcgcggaagcactctgcgcccttgataccgcccgggaggacgatgatatcgaaatcaccatcggccacctcgaccagcggcgcatccgccagcagtttgacgccgcgcgaacagacgatggtcaggctgccgtcgctggcgacgctggcggtggtcacctttactccgccgcggaccagcaggtcgatagtggtgaccgcttcggtctcttcgctaccaggggcgaggcaaatcagtgccgacgcgctcatattcattctccttacgcttgatcaattcaaataagcgggcgttttccggtacggcgacgccgtgggcgcgggcgcggttgagcagaaaaccggtgatgtagtcgatctctgtatgccgctgggcgcgaacgtcctgcagcatggaagagatattttctgccgtactttcaattacctgttcgacataaaatagcaggttttccgccgaggtatgaataccttcgcgctccatcaccgccgccacctcgcgacaaatggccgcaacttcctgcgtatagtcgcgcagatcgccgtttttacaccctttgagcgcggtcagagggttaatcacgcagttaaccgccagcttgcgccagatggccgagtggatattgttatgccaggcgacatccggcagcacgctctgcagaacttctgcgagatagctgtagtccccctcgtagctttttgccggtccgatatgcgtggtgccctgggcaacgtggatgatgacattcccatcgcgccgcgccgcctgggtcgtggaggccagcagcaacggctgtttcacgccgcgcagctcctcgacggtgcccatgccattatgtaccagcaaaattggcgtggtgtccggcaggatcccggccaggtgctttaccgcattcgacacctgccaggcctttaaggtgacgatcagcagctcgctgctggcgagaaaatcggggtcgttggccgtcagcgattcgttgaacactgagccatcggtttcaatgacgttgacgctacagaatggctgcggtacgcgcagccagccctggacttcatgtccctgtttgtacaacgcggtcagccatagttgtcccagcgcaccgcatcccagtacggttactttcattgttcctcctcatctgccgctatcccaggcgctgatggctaaagtctatctcgtcgcttttcgcatcgtcggacatcacggggaaaatagcgcgagcgttgcgtaatcagctaagcttccgggataacaagttgagttatgccgcgttgcaggtattatgcaacgcaaaagaaacggaaggagaggaaaagatgccatctttcgatattgtctctgaagttgatcttcaggaagcccgtaacgcggtggacaacgcgagccgcgaagtcgagtcgcgttttgattttcgtggcgttgaagccacttttgaattaaacgacgccaacaagaccattaaagtgctgagcgagtctgacttccaggtgaaccagctgctggatatcctgcgcgccaagctgctcaagcgcggcattgaaggcacctccctcgacgtaccggaagatatcgtgcacagcggtaaaacctggtttgttgaagcgaagctgaagcaaggcattgaaagcgcggtgcagaagaagatcgttaaactgatcaaagacagcaagctgaaagtgcaggcccagattcagggcgaagagatccgcgtgaccggtaagtcccgcgacgatctgcagtcggtgatggcgctggtgcgcggtggcgatctgggacagccgttccagttcaaaaacttccgcgactaaggcggcgggcagacagcaaaaagcggggaattccccgcttttttatacccctttgatgagctgctctatctcgaagcggttggtgaccttgctgtcgattttgatatacaccgaacgctcctcgggtaccaccagcgcctgatgaaccccgctggcgctcagcagacgcgcctgcagcgcgctgtcgaccaccacgccgtccggcacctccacccgcaggctgctgacgtacggcggctcgctcatggtgctggccaccagcagccacagcatcgccagcagggcgcccagcagaaacacggtttgcgaatcaaagaaaccatcgacccagccgccaagcgcgccgccaatcgccacgccgagaaactggctggtggagtagacgcccatcgcggtgcctttgtagcccgccggagactccttgctaattagcgacggcagcagcgcttccagcaggttaaacgccaggaagaagagctgaacgcccgccaccagctcccagaagtagcctccggcgccccagaggacaatttccgcaatcagcaggatggcgacgcagagcaggaagacgcgcttcatcttgcgcttcacttcggcgtagatgataaacggcaccaccgagatgaacgagataaccatggtgaccaggtaaatcttccagtgctcggcggccgggaagccggcggcctccagttgtccgggcagggcgacaaaagtggacatcagcataatgtgcaggcacatgatgccaaagttaagcttcagcaggcgcggctccgccagcaccttgctaaagcagcccttcaccatcccggattcgcggttaaggacatggttatggctgttgggcaccacccacagggtgagcaggatgccgacggtcgccaggatggcgatcatccagaacagcgcgtgcagacccagctggtgggtgacaatcggccccagcaccatggcgatggcgaaggtgacgccgaagctgacgccgataaaggccatcgctttggtgcggttctgttcgcgggtgagatcggaaagcagggccataaccgcggcggcgatggcgccggagccctgcagggcgcggccaagaatgatgccccagatggagtcggtgagcgcggcgatgacgctgccgagcacgaagataagcaggccgccgacgatcaatggcttacggccaatacggtcagataacagtccgaaggggatctggaacaccgcctgcgccaggccgtagataccgatcgccaggccaatcagcgcttcacttgcaccctgcaacgccatgccatacgtggtcagaaccggcaggaccataaacatgccaagcatgcgcagggagaatactgtccccaaaccccaggtcgcgcgcagttcccctggcgtcattttgttatcgttcattaccacctcaatataaaaactgcgcctagtgtagcggcggggggtaagaagcgtaaataaatgtttgtttaacagatattacggggctgttgcgcgatgcgacaagttggtaaaaatcaataaaccagtggagggggactccactggcgagggggaaaattaaggtaaagtaaagtcaacccactggctgccagcgtcagccgatttgacgcactgctctacccaatagacgccgtgcagcccggcttcgacgtccggataccagaagtcttgcaggaaggcgcgatcgtcgcggtccgtggcgtcaatcgcctgcgcatagcggcgatagaggttggcccaggcttcgaacagcccttccggatggccgccgccaatgcggtcatccgccagcgcgttcggcgacaggtagggcatcccacgttccagaatgcgcgccggctcgccctgcacctcatagctgagctggttaggatgctcatcccaccattcgatgcttgctttttcgccgacgatgcgcactttttgcgagtgcatggcgccgctgttgaccgcgctggtccacattgagccaaccgcgccgttgtcatattccatcaggacaaaggcgttatcttccagcggcgcgcgggagggaacaaagctctgacgggagcacatcagccgtttgatattgagctgcggcgccatggtctcggcgacaaacagcggatgggtggccagatccccaagcacatagctgggcccggcaaacttcggcgttactcgccagcgggtggattctgcctgcagctcgacggcctggttatggaagccgtgggcgaattgcatgttaacgatgcggatctcgccgagcagtccatcggcaatcatctgccgcgcctgctggatcatctgatagccggcatagccgtaggtaacgccgacgattttgttctgttttttgctcagatccaccagctcgcgcgcctcttcggcggtaaagcagaggggcttttcgcagataacgtggagtcccgcctccagcgccgctttggtgatggcgaaatgggtattgttcggggtggtgaccgagacgacctcgatcccgtcagggcgctgcgcctcttcgcgaaacagggtctggtagtcggcgtagcagcgctccggcgcgatgcccagttgctcaccgaacgctcgcccgcgctcggcattgacgtcaagcgcgccggccagcagggtataaacattgtcacgcagcgccgcacagcggtggctgtagccgatctgactggttcccccgccgccgaccatgccccagcgcagggaacgggataagggtttcaggccgtttaacatggtgctctcctttttgaaatcatttgcactctgaggcgctcaatgccgacgcctgcggcaacgcgcatccggatagactgacttcaacttaaggaaatgtttgttctgtttcaattgtgttgtggaatttattttccatatatgcgagggggatcgaattagcgaaagtttcttttgcgcttggttgaaaaggtgagggcgggatatcgcctgccggagtcgtccagattgttgcgggcgttttttcgtttcaacaaaatatgaaataaattttctttattagctgctgaaggcggtgcaatccgccgattgcaccggggaccagatgccgctatgacgctccgcgcacagacgcgggggaagttgaagcgacgggaggatgaccggccgcaaagatgcccttcgccgccaggcctgcgacggtgagggctgccgggatgccgaggatcaaaaagacgctttcaaagggcaggttgagcgccatcatctcggcgccggcaaaggcgctgagaatggcgccgatgcgcccgacgccgtgcatccagctggagcccgtcgcccgcgcctgtgtagggtagtagcgggcggagagggcgttcatgccggtattcgcgccgttcaggcaggcgccgctgataaacgccagcatacagagcaaggcaaagctgcccgcggcgtagcccatcgccatggtgaacaggccgccaacggcgtagattatccccagcgcgcgatgggggttgatcctgtccatcagccagccggcaaacaacgagccgagggtgccgcccgcctggtagatcgccgtcatgatggccgcctggctaacggtcattcctaccgctttaaccagcgttggcagccagctgccgaggatatagaccaggaacagccccataaagtagaccagccatagcatcagcgagccgaaaccgtactggcgggagaggacaatgcgcatcgcgttgccggccgccggctgcgccggcaggataaacctcacgttgtcgctgatttgtccgggatagagacggttaagaatggcgcgtatgcgcgccgcgggcgcttgtttgatcaccagaaaacgaaccgattccggcagcagccagatgagcaggggggcaaacagcagcggcagaataccgccgagcgccatcagcgagtgccagccaaactgggggatcagccacgatgccgaaaatcctcccgccgccgcgccgaaggtgaagccgcaaaagatgacggtgataataaatgaacgctggcgttccggggcgtattccgacaccagcgtcccgatattcggcatcgcggcgcccagcccgaggccagtcataaagcgaaagaacatcatctgttctacgttgtgcgagaaggcggtggcgatggtccagaaaccgaagaagaaaacgctgttgatgatgattttcttacgtcccagccagtcggcgagcgggccggagaaaatcgcccccagcgcgaggccgatcagcgcggcgctgatcaccagacccagctggtggttgcttaccccccattccagctttagcgtcggggcgataaagcccatgatcgcgatatcaaaaccatcgagagcgatgacgcaaaagccgagaaatataatcagcttctgaaatcggctcagcgggttacgatttattaactctctgacatccaggcgttgagtctgtgtcatagcgtattccttatgcgcaggcgcgcaggtagggctgcgcggcatcgaacagtaactgcgcccgctgaagaggcggcagggcgccttgctcgccgtcaagcggcacttcgagagagaccggcagcgtcgccggcagggccgacatcagaccatgcagatccagaccgccttcccccggcacgttgcgcgccgagcgggcctggcggataagttcctgctcgctctccggcctctgcgccgcgccatcgcagagttgcatatagttgagatgatgcgcgggcaggctggagagggcggcgagcgattctcccgcgcgccagaaatggagagcgtccaccagaatgccgatgtcttcccgcccgctggcggcgattagtgcttgcgctgcggcgatgttgcgcaactgggtccagggcatcggctcaagattcatggtcagcccaaatggacgaccggccgcggcgaggatggcgaggttgtcagcgctgcgctgaaggttgtcatcattgccggcgactaacacctgtccggcgccaagacgcgcggcggtctccataaaacgctgcagccgatcgtcgagggtaaacccgggggtcaggcggacgatctccacgtccgacacgcggatgccagtttccatcaacgcggcgagcgtcgcccggacggccggggtatcgcccagcatgtcgtagtccgggtcggtcggtgtggcggggagcagtcgcagcccaacgtgggtaaaaccggttctggccgcaatccgcacctgttcggggggagggacatcgagcagggtcagcgcggcgagcgatagggtacgcttgttcataaagggctccggtacagttgcaggtgaagagagttagggtgcatccattcgtggaaatcaagttatattattgtttatatttgttttttttgtcaggcctttacccaccagatagccgaaggtcatggcgggcccgagggtgatccctccgctggggtaatagccgcgcatcacgctcgacatgtcgttgccgatggcgtacaggcccggtatcggcagctgctgttcatccagcacccgggcgtgttcgtcggtttgcaatccgctgaaggtgcccagcgagccgggcagaatgcgcaccgcgtagaacggcccttcgcgcagcggtccgagcgtcacctgatggtcaccctgggcgcggttataggctgatgccccgcggtgaaaatcgacgtcttcgccagcgctggcgaagtggttaaagcgttcaacggtttccgccagcgcattggcgtcgatagcgcactgcttcgccagctccgccagggtgtttcctcgctgcagatagccggtacgcagccaggcggtgggggtgaacgggaacggtctggcgtggcccaggccgtagcgacgcagcgcgcgacgatcggccagcagccacgcctgcggcgtgtcgcccgcgggtgtggccgccagcagggcggcgataaagtcatgataagagtcggcctcgttaacaaaacgtttgccgttgggcaggacggcgatcaccccgggtttggcgcgctccaccagatgaggaaacattagctgctggccgctggccagagtgacgcgggacaccggcgcccaggccagcgggtggcgcagggaagtgtcgaactggccgccgacggattcgccaagcctgatcccctcgccctgattgtccggcggtgcggcggagaaatggccgtaaccctccgcagcgtgaggcaccacctgcgccagccgctggcgatcgtggggaaaaccgccgcaggccagcaccacggcgccagcttcgacgtgaatctccccgccgtcgctgcgcagcaccgcgccggacacgcccggcggaccctgcagcagccggaccaccggggcattgagctgaaaacgcacgccggcgtcgagggcggatcgcagcagacgggcgaccagcgcattgccattgaccagatgctgcccccgtccggcgcgtagccgctgccagccgtggcgcagcaggcggcgggcagcatacagcgcggagcgcggcgagcgggtggcattgaaaaaatgcgccatatccgcgccgccggcgatgcccatcccgcccaggctaatggtctccagcggcggacgcaggcgatggagccagtcgccgagcaggcggccatcgtagggttgcgcggtgaccgaccgcccaccgttcgccgcacccggcgacgggtgaaagtccggcatggcgctgcccgagagaaactgcaccgccgtccgctgatggaaaaattccaccatctccggcccgtaacgcaggaaggtttgcagacgaatatcggcggcttcgccccccatctcatgctgcagataggtcagcggcgcgtcggctgcttcgtcgatgccctccgcccgcgccagcgggttgcgggggatccacagccagccgccggaccaggcgctggttccgccgagtactgacgctttctccgccaccatgacgctggcgccgtgcatcgccgcagtcaccgcggcagagagccccgcggcgccggagccgaccaccagcacatccaccttcacaggcccgctcatgttggactccttactgcagaggtgaaaaagcggtggggcgcatcagcaccgactcgaggcgttccacggcggccagttcgcgatttttgcgcgagaaggtctgccagcgttcgtcctgggccatccgcgcgcggcgcaccagacgatcgtccaggctttcataagcccagatatgcactacctgattgaccacgccgatctcggtaaaaaagaagccgattagctggccgagatggtcggtttgcaccgccagggcatcgctttggtacagcgccagccagtcggccattttcagcggattgatggtgtacgtgcgtttttcgtagatcatgatgttttcctgattagtgggtggagtgttgtgccagatggcaggcggcgagatagccaaacgtcagccccgggccgagggtgatgccggggcccggataggtgccggccatcagcgaatccatgtcgtttcccaccgcgtacagccccgggatggggtttccttgggtattgacgacctgggcatcggcggtggtgaccaggccccgtgaggtccccagatcgccggtataaagtttgatggcatagaacggcgcgctgagcaggggggcattacaggcgtcaggctgatggcccggatcgcccatcgcccggttatagctgttgccgcctttagcaaattcccgatctacgccctgcgcggcgtcacggttgtagcgggctaccgtctcgctcagggtttgggcatccagaccaagctgttgcgccagcgcggccagggtatcggctttgtgcagatagccagcggcgaccagggcgtcattattgaccggcgccgggcgcgccagcccgaggccataacgcttcatcgcctgggcgtcgcagagtaaaaaacagggggcattttccgctgcatcctgcattgcgctggcgaaatggtgataggagctggactcgttgacgaagcgtaccgcccgctgattgacggcaatcacgcccggttttgcgcgatcggttaccagatgggggaagcgctcctcgctgccgtcggcccgggtcagcaccgataccggcgcccagaaaaagttggaggcccgatcggctccctcgcgagcgttaaacgccgccgcgagatgcagcgcggcgccatcgttggccggcggcgacatggtgaaatgctcgcgggtgtgcggccgatagcgcgccgccagcgcgcccgcggcgaagccgcctgcggccagcaccaccccgcggcgggcgtgcagcgtctctctttgcccctgatactcaatctccaccccgcggaccgcgccttgcgcttcgcacagcgtcagaacattgacattcagccgcaggttcatgcctttacgcagcgccgtagtcgccatgcgggcaatcagcgcattgcccatcgccaggcgggtaccgcgagggtacttcacccggtcgcgggcatagcgcagcagcagccgggtgcaatgggccagggagcgcagcgagcggcgcatgtcgagaaaatgttgaatatcgacgcggttgaccatcatcccgccaaacagcagcatccccggcggcggtgaacgcaggtcgcgaaacgcgtcccccagttcacggccgtcatactccaccacctccagcgcacgaccgacgtcgactgcgccgggttcatccggatagtaatcgggcgagagcggacgcaggctgtactttactgccccctcacgctcgagaaaggccagcgcctcccgcccggcgctgacaaacgcttcggcaagatcttctcggtactggccctcgccgataatggttcgcaggtaggttttcatcgcctcggcgctaccgcttttgccctcggcgcgcgcctggtcggtatcgtgcagccacacggcgccgccggagatggccgaggtgccgccgaactggccggctttctccagcatcagcaccgacagccctttacagcaggcggtgaccgcggcggcaaaaccggccgcgccgctgccgatgacgatcacatcccagctcttcatgccgccgctccctgcgcctgtgggatggcgccgataaactggcccatcagcctcatctgcgccagcgccatttccggcccggtctgtactttacaaccacgtgcggcggcgaaagtgagcaacggcgtcatcaccggggcggtgacaacgtcggccacatgagtggtgctgtcgagcgtatccagcagcgcctgcggtagaggcagctcatcaaatccggccatgccggccggtgagccattaaccagtagatcgaggccgtaaagggtgtctggcagcgcgctcagttgcaccgccggaaaggcctcagccagaaggtcatgcaggcgctgccgggtggccggggtttgatcgtgcagggccagccgacggatccccgcctcgcacagtccccaggcgatggcgctgccgacgccgccgcaaccggagagcagcgcctgcttacctgccggctgaaaaccctgcgcctcggcggcgagctgaaagccgacgccgtccagcatatcgccctgcaggcggccatccgccagcttgcggatcacattgacggcgttgagtcggcgggcgcgcggcgtgaggtcgtcgaccagcgcggcggcgcgttgtttatgcggcaccgtcaccagcacgccggtcatgttctgccagccgcgcagggcgttgaggtaggcggccaccgcgtccgggacgatatccaccgggatcataatgctgtccatgtgctgttcggcaaagtagcggttgaagttatctggcgatttcacctgggcgatcggatgaccaatcacggcgacaacctgggtagttccactgaccatttcaaacctcatttgttaaatgaatgttgtgaaagtatttcagtggaagctgggagcgacaacgcagaattcggacatgtcggttgttaatcgcacgaacgctgcgataatcgcaggaaatcgataatgatgttgcaaaaatgtgagcgaatatgcaaaacaccattcatccacgcgatctgatcgtcggtttacaaaaagggctggcgctaattcagcttttttccaaaacctgcccaaagctcaccgtcgcccagacggcgaaaatgagcggcctgacgcaaagcgccgcgcgacgttttctgctgacgctcctgcatgagcgctatctgcaaaccgacgggcgctattactggcttaccccaaagacgctgcggcttggccaggcctatgtcgattcggcgcagtttcctcgcatggtacggccgattgtcgaatacatcgccagccggaccgaagagcacgcctcggtgggggtggtggatgaagatgaactggtctatatcgcccgcagtcggcatacgccgttcaactctacgtcggtgcggcttggggagcgggtgcccattttctgtaccgccggggggcgactgtggctggcttcgctgccggaagcagagtgtgagaccgtcctgcagcgcataacccgggaacaacgtaccccctatacggtgaccgatatcgcgtcgctgatggagaaaatcgcccaggtacggcgccagggatacgccaccattgagcaggagtttgagattggcatgctggtgctggcggtgccgttaaccgacagggaagggacctggtggggggcgctgagtctgaccagtcatcaatcgcgcacttcgctggaagcgttatgccgcgatcacctcgatctgctctacagcgcgcaggcgatgctggtgggttaaacagggcagccagtggcgctgccctaagatagacgtcgcttaggccgacgctttggtcagaaaggtgttccagtcgctggccgcgttattcacgaaagtattccagctgttgccggcggtgttaacaaagcttccccagttttcctttccggcggtcacaaaggtttcccagtttgactgtccggtcaggaaggaaccaaacgccatcgcgctgtcgccgacgaaggaggcaaatgcggtgccggaggtcagaacaaaagaggtgaagccgacgccagagttggcgacaaagctggcgaagctgctggctgcgccgaacagattaaagccaccggagatatactccatttcgttcagtgttaactctttcattgcaattccttgtagtgattatttcccaaaggggcaagagccccggcgaaaggtagcattgcaggaccgtgcggcgcgagtgatgcccgatgcgtactggctcaatttttcctcattttttgatatgaaagatagcgggaaagcgacgggggaggggagggaagtatgaaatgagaaagaaagcgatgatgaaacaggaaagaaaaagccccgtaaatacggggctttagatcgtacgggagtgcgtaattatctcacgtaagccagcagactatgtgaatccggcaccataaagtcaacggacatcatcacggacagcgcggtgatggcgacgatagaaaagacgaacagcttacgcgcccagactttatcatcggccactttatagccacgcagcgccatgcccagccaccagacgctgaccgctgccgccacgaccaggtatttatacccggcgtagccgcccagcgagagcatcagggttgccacggcaaaggcgacgatgtacagcgtaatatggtttttggcgaccgaaatgcctttcaccaccggcagcaccggaatattcgccgcctgataatccttaaagcggaaaatcgcgatggcgtaggagtgaggcatctgccacaggctaaagatagccagcaggatcgccgcaccgctgtcgaaatcaccggtgaccgcgcagtagccaatcaccggcggcgcagcgccggagagtgagccaatcagcgtgccgtagacggagtggcgtttcatgtacaggctgtagacgccgacataaaccacgaaccccatcacccccagccagcaggccagcgggttagcgccgaaccacagcagcatgaagccagcaatacccagcaaggtggcgtacaccagcgaagcttctggcgagatcagccctttgaccagcacccggtttttcgtccgttccatcttacgatcgatgtcccggtcgatgtagttgttgaatacacaacccgaggcgaccaccagggatactccaaggagcgtccagacgaacagcggatagtcgatgtggcctttggaggccagcaggaaaccgccgatcacggagatcaggttgccaaaaataatgcctggtttcgttacttgcaggtattgcttaaacatactcgccgctcttagtgcatcatcatgttgtagttcaggttccacataatccagatggagccgacaaccacgatcgcaatgatgattacggtgaagataaatgcggtcaggttccaaccttcatcggacttgctgttcatatgcaggaagtacacgaggtgtaccacgatctgcaccacagcggtcaccagaatggtgccaaggataaccgcatgcgaggcggagccactcatcaccatggcgaacggaatgaccgtcaggatgatggacaggataaatcctgtcatgtagctcttcacgctgccgtgagaagcgccgctatgatcggtagaatgactcattacatcgcccccatcagatagacaaccgagaacacgcagatccacacgacgtccaggaagtgccagaacaggctcaggcacaggatacgcgtgcggttagtgctggtcaggccacgacgtgaaacctggaacatcagcaccgccatccagataagaccggaggtcacgtgcagaccgtgggtgccgaccagcgcgaagaacgcggacaggaagccactacgatccggaccaaagccttccatgatcaggtgatggaattcatagatttccatcccgataaatccggcgccaaacaaccaggtcaacgccagccaggaaaccacctggcttttgttgtttttgtacatggcgatagccgccatgccgtaggtgatggagctgaacagcagcagtgcggtttcaaccagaacgaacggcagttcgaaaatatctttgcccgtcggtccgccggccgtgccgttcaccagaacggcataggtagcaaacagcgtagcgaagataatgcagtcgctcatcaggtagatccagaaaccgaataccttcatcggtcctgtatcatggtgcccgtgttcatgcgcgtgggcagtatgcgcaagagtatcagttgccatttttcagccctgctttgttaatctcatcgaaatgctgtttttccagtttttcgacttctgcaaccggtacgtagtaatccacgtcctcgtcaaagctcttaataatccaggtcgctacgatgccgatgaagctggcgatcgccatccaccagatatgccagatcatggcgaaaccaaataccgtagcgaaggcggcaatcacgatgccggcgccgctgtttttcggcatatgaatttcttcatagtgagcaggctgtttgtacgcttcacctttctctttcatttcccagaaggcatcacgttcgtgaacctgaggaacgatagcgaagttgtagaacggcggtggagaagaggttgcccactccagcgtacggccaccccacgggtcaccggtcaggtcgcggttctgatcgcggtcgcgaatagacacgtagaactgaatcagctggcacagaataccgcaggcgatcagcgccgcaccgcaagctgcaataaccagcatcgggtggaactgcggatcgatctgctggctcagacgacgggtcatacccatgaagcccagcacgtacagcggcataaacgccacgaagaagccgatgatccagaaccagaaagcgcgtttgccccaggtttcgttcagggtgaagccaaaggctttcggccaccagtaggtcagacctgcgaagcaaccgaacactacgccgccgatgataacgttatggaagtgcgcaatcaggaacaggctgttgtgcagaacgaagtccgcgcccggtaccgccagcagcacgccggtcatcccacctacggagaaggtcacgataaagccgatagtccacatcatcgccgagttgaagacgatgcgaccctgatacatggtgaacagccagttgaagatcttaaccccggtcgggatcgcgataatcatggtagtaataccgaagaaggcgtttacgttcgcgccagcacccatggtgaagaagtggtgcagccaaacgatgaacgacagaacggtaatacagacggttgcccataccagagaggtgtaaccgaacagacgcttacgcgagaaggtcgcggcgatttcggagaagaccccgaacaccggcagaaccaggatgtacacttccgggtgaccccaggcccaaatcaggttgatgtacatcatcatgttgccacccatatcgttggtaaagaaatgggtgcccaggtaacgatccagggtcagcagcgcgatggtgacggtcagaattgggaacgaggcgataatcaggatgttagcgcacagagatgcccaggagaatactggcatcttgaacatggtcatgcccggggcgcgcatcttgataatggtcacgaagaagttaataccggtcagggtagtaccgataccggagagctgcagcgcccaaatccagtaatcaacccctacgccaggactgtactcaattcccgacagcggcggataggccagccaaccggtctgcgcgaactcaccaacgcccagagacaggttaaccagaatcacgcccacaacggtgaaccagaagctcaggttgttgaggaacgggaaggctacgtcgcgcgcgccgagctgaagcggaaccaccaggttcatcagaccgataacaaacggcatcgccacgaagaagatcatgataacgccgtgggcggtaaagatctgatcgtagtgatgaggcggcaggaagccggcttccccggccgaagccagcacctgctggctacgcatcatgatggcgtcagcaaagccacgcagcagcatgacgattgccacgataacgtacatgataccgagacgtttgtggtcgacagaagtcagccactcgttccataggtaggaccacttaccgaagtaagtgatggctgccagaagcgccagtcccccaatgataatcgcagccaccgttaccacgataataggttcgtggtagggcactgcatccagtgtaagttttccgaacatcgttttcttcctcggccccttagtgagcggtttccgcgtggctcatgtccatgccttccatcccgtcgtgagcagcgtgctcgccttcaggtttagacatgttcatgctctcgtgagacatgaatttgttcacaacatctttgaacagatccggtttcacgttagagaaatattccactttgttgtattcgctaggcacagccactttctcgaacgcggccatggagtccatggagttcggagactgtttcgcttttgcaacccactgatcgaaagtcgcccgatccggggtggcaatcgctttgaacttcatacctgagaagcccgggccactgtagctagcggagataccgtcataagtaccagcttcgtcagcaatgaggtgcagctgagtctgcataccggccattgcataaatctggctacctaagcgcggaataaagaacgagttcatcaccgagttagaggtcactttgaagtgtaccggtacgttcgccgggaaggcgatttcgttaacggtagcaataccctgttccggatagataaagaaccatttccagtccatcgatacgacttcgatggtgattggcttctcgtcatggacaagcggtttgcttggctccagtgcgtgagtggttttccaggtcagaacggccaggaacaggatgatcagaataggtaccgtccagaccacagcttccactttgttggagtgtgaccagttcgggctatacttcgcatctttattgctcgcgcgatacttccaggcaaatcctactgccatcaagacggcgggaataacgacaatcatcatcaggccgaaggccgtcagaatcaaagagcgttgctccagtccaatctgtccttttgggtcaaggagtgcagaatcacaaccactgagtaatacagtacctgcgattaatgacatccatcccaaacttttattgtatttcctgagtctcattgaacgacctcaattccacgggatctggtggcgtttaaagtgtatgggcattttacggtaaggttgcattactgtaaacatgattggatctctgtcagttctgtgttagcggcttctgcttggtttgtcacatatgtaacgtagtgttacttaatcgcttgcaaagcctgattttcgcgggattgataacgaaagggataagaaaaggagtgcttagcggctaatgggcataaccacccacaaattagaacaattgtttaacatttaattatcaaataaaagacattgtgaaaacgaaaaataaaatccccggagctgaatcggttaaattatttaaagaatcgaacgaaaactgtcaataatttccagaaatcaaaaacgcacaaaacaacaaatagcgcggcggacaatataaaagcgttaataagccgttataattacgtttcgtaattacaacggctaataatgatgctggatccttaaatcaggcgggttttacgcagcgccagatagtcaagcaggccgccgaacaaaatcccgccgacggcggtgagcgcggcaacctccagcaggccggacaggaaggagaacgacgtataatccagcgcgttgaggatcagcagcgccagccacgccgcgagcagcaggcagcccagtgtcaggatccccagcgccagcgcataggcctgcgggaactcgctacgcggcataaagcttgcggtgcgttgggtatgctcaagcgtttgccggcacagcagcaatagggcaatccccggcaccgccgcaacgacagagaagagatagaaggtcgaccagccgtgagcctcgacaaaccagccggcaatcggcccaacgtatacgcgaccgaccgcagagagcgccgagagcagcgcgaactgggtggcggagaacgacttattacatagcgtcatcagcagcgcgacaaatgccgccgtccccattcccccgcacaggttttcaaagaataccgcggtcgccatggaatagaggtgcttatcggtaatcgacagcagccagtagccggcgttagagaccccctgcagcaaaccgaaaatgagcagtgcccgaaacagcgtcagccgctgcatcaggacgccgccgtacagggcgccgagaatggtggcgaacaggcctaaggttttgttcaccattcccacttcgccagcgtcaaatcccacgccgcggatcaggaaggtggtggtcaggctcatggcaaacgcatcgccaagcttataaaggacgatgagcagcagaatcagccaggcgttgttgcggccgaaaaaatcgcgcagcggttcggctaccgcctgctcgagcgatctggggaccgggataacgtcgctcggttcgggggccagcagcgtggcgataatgcagggtaccagcagcgccgccatcagccagtacatcccctgccagccgagatagcggtcggcaagccacagggccagtccaccggagaccagcatccccaggcgatagcccagcacgctgatcgcggcgccggcgccacgctcttctgctggcaacacgtcggttttccaggcgtcgaacacaatatcctgcgacgccgagcagaaggcgatcaccaccgccagcgccgccatccagcgtaattgggtgaccggctcaagaaagcccatcgtcgcgatcgccagcaggagtaatacctgggtggtcaacagccaaccgcgacgacgcccaagaaacggcggcgtgtagcggtccatcagcggggaccagaggaatttaaagacataggcctggccgacgagcgagaaaaaaccgatcgttttcagatcgatattttccaccgtcatccaggcctgcagggtaccggaggtgagagccagcggcagaccggaggcgaaaccaaggatcagcaaaatggctgatttcggctgctgaaaaatgcgtaagtaatgactggacatagcataaagcacgaacccggcggaggccgggttcgcgatagcattaacgcgcgttttgcttgatgaaatcgtggatgctggtgtcctgcgccatatcggcgatggtatcggtcaggacgctgttgacggcatcagcgatgtttttgttcgaggcctggaaggcgccttcaacggagtagctggcgcggtagtttttggtcattttcgtgccgtttgccgcggtggcgatgatggcgatatcggctttggtggcgatgttatagcgcacgttaccctgagagacgtcagcatagagtttgttgacgatgatctgcagatcgaccgcgccgttcgggccaatcatgtagccgcgagacgtcatctgtttctccagcacttcctgcagcaggaagcgcagatcgcgggaggcggtgagagtgaccagctgattgtcacgcgtcactttcgccagcgcctggtccggacgctgatcggcgccgttgatgctgacggtcacgcccatcaggcttggatcctgctgcggcagcgtgattttcggcgatacttcaatggtggtcggcggcgtggcgcatcctgccagcataaacatggcgaccaacgggaaaagaatcttcttaagcatgttcaggtctcaacgcatggtgttgttataaggaaaattaccgccatcatagcattgccaacggcaaggggaagtggcaacgcgtgtaaatccatcgtgctggcggttttctgagcgtcccgccacggttaatggctcgttccccgacggatctggcgaccagagccagtaaacgtgatacttttgaatgaaaatatcagaacaatgctaattttttgttgttttctcctaatggaagcggtaaaagcggctaacatttaaatggagtggcggcatctcagcgttgtcggaggagaaaattcatgatgatacgtgaacagatcgaagcaaaacttagagcagcgttcgacccgatgtatctcgaagtcgtggatgaaagttatcgtcacaacgtccctgcgggctctgaaagtcattttaaagtggtgttagtgagcgatcgcttcactggcgagcgtttcctcaatcgccaccgtatgatctacggcacgctaaccgaggagctgtcgaatacggtgcatgccctggcgctgcacacctacacgattaaagaatgggaagcattacaggatacggtatttgcttcgccgccgtgccgcggcgcagggagtatcgcttagaaatcccatttgcaaccgctggcgcttttccagtatgttgcttgcagatttagcaaaaacggcctacgggccgttttgttttgcctggaaaatgcgcaaagtcagcgcttttgcgggcaaatttgagcgggaaatgtgaaaaatgccgcagcaccaggcgacaaccgttctcgactcacaaaagtgatgccgctataatgccgcgtcttatatatgaatgtcttcgggatgattctgacgacagggaatgtgtttctgatttgaagagggcatcccggttctgcgaagccacctacacgcgcttccagagttgaccgagcactgtgatttttttgaggtaacaagatgcaagtttcagttgaaaccactcagggccttgggcgccgtgtaacgattactatcgccgctgacagcatcgagaatgctgtcaaaagcgagctggtcaacgtagcgaaaaaagttcgcattgacggcttccgtaaaggcaaagtgccgatgaatattgttgctcagcgctatggcgcttccgttcgccaggacgtgctgggcgacctgatgagccgtcatttcgttgacgcgatcatcaaagaaaaaatcaatccggccggcgcgccgaactacgttccgggcgaatacaaactgggcgaagacttcacctacgcggtagagttcgaagtgtatccggaagttgaactgcagggtctggacgcgatcgaagttgaaaaaccggttgttgaagtcaccgacgctgacgttgataccatgctggaaactctgcgcaagcagcaggcgacctggaaagaaaaagaaggcgcggttgacgctgaagatcgcgtaaccatcgacttcaccggttctgttgacggcgaagagttcgaaggcggcaaagcctctgacttcgtactggcgatgggccagggtcgcatgatcccgggcttcgaagacggtatcaaaggccacaaagcgggtgaagagttcaccatcgacgtgaccttcccggaagagtaccacgcagaaaacctgaaaggtaaagcggctaagttcgttatcaacctgaagaaagtcgaagagcgtgaactgcctgagctgaccgaagagttcatcaaacgtttcggcgtggaagagggttccgtcgctggcctgcgcgctgaagtgcgtaaaaatatggaacgcgagctgaaaggcgctgtgcgtaaccgcgtgaagtctcaggctatcgaaggtctggttaaagccaacgagatcgacgttccggctgccctgatcgacagcgaaatcgacgtgctgcgtcgtcaggctgctcagcgtttcggcggcaacgagaaacaggctctggaactgccgcgcgagctgttcgaagagcaggctaaacgtcgcgtcgttgttggtctgctgctgggcgaagtgatccgcaccaacgagctgaaagctgacgaagagcgcgtaaaagccctgatcgaagagatggcttctgcgtacgaagatccgtctgaagtcgttgagttctacagcaagaacaaagagctgatggacaacatgcgcaacgtggcgctggaagagcaggctgttgaagccgtgctggcgaaagccaaagtgtctgaaaaagccacttccttcaacgaactgatgaaccagcaggcgtaatttcgccgctatcgtttaaggttcgagcaaaaacccgttgccgaaaggcggcgggtttttttttaagataatgatagccacaggcacggtgcgaaaacgcattaaccatgatagcgttacagcaaaagcttgttatgcttgaaatatggcaacaccatccccattaccgggggaggcaactgcatccgcaatcgcacgcgtattgaagaggcggtgacgcattcagcggatagaaactgtggctgataatccgtccgtaaggttacaatcagtgcagcaggtattttaaaattactccaggagacggaaatgtcatacagtggcgaacgagacaactttgcaccccatatggccctggtgccgatggtcattgaacagacctcacgcggtgaacgttcttttgatatctactcccgtctgcttaaggaacgcgtcatttttctgaccggccaggtcgaagaccacatggcaaacctgatcgtggcgcagatgctgtttctggaagcggaaaacccggaaaaagacatttacctgtacattaactctccgggcggggtaatcaccgccgggatgtcgatttatgacaccatgcagttcatcaagccggatgtcagcaccatctgtatggggcaggccgcttctatgggcgcgttcctgctgaccgccggggcgaaaggcaagcgcttctgcctgccgaactcccgcgtgatgatccaccagccgctgggcggctatcagggacaggcgacggatattgagatccacgcccgtgaaatcctgaaggtgaaaggacgcatgaatgagctgatggcgcatcataccggccagtctcttgagcagattgagcgtgacaccgagcgtgaccgcttcctgtctgctgcggaagccgtggagtacgggctggtcgactctattttgacccatcgtaattgatgcccaaggcgcaagggtgccgctttacgcttcatccttctcgccacgtctgtgcgagcggttggcttttattcggccgcttgtctggcaggcttgcggccggtggcttcgctaccggctcgatgtagcgcgaaggattttgtgtatatactaatgaagggcggcacaacgctatatggcggcttgcgcctgagaatggcatttgcgtcgtcgtgtgcggcacaaagaacttaaaaagaggtttggactcatgacagataaacgcaaagatggatcgggcaaattgttgtattgctctttttgcggcaaaagccagcatgaagtgcgtaagctgatcgccgggccatccgtgtatatctgcgacgaatgcgttgatttatgtaacgacatcattcgcgaagagattaaagaagtggcgccgcaccgcgagcgcagcgcgctgccgacgccgcacgagattcgccaccaccttgatgactacgtcatcggtcaggaacaggcgaagaaggtgttggcggtcgcggtatacaaccactacaagcgtctgcgcaatggcgataccagcaatggcgtagagctgggtaaaagcaacatcctgctgatcgggccgaccggttccggtaaaacgctgctggcggaaacgctggcgcgcctgctggatgtgccgtttaccatggcggacgccactaccctgaccgaagccggttatgtgggtgaggacgtcgaaaatatcattcagaaactgctgcagaagtgcgattacgacgtgcagaaagcgcagcgtggcatcgtttatatcgacgaaatcgacaaaatttcgcgtaaatccgataacccgtcgattacgcgcgacgtctcaggcgaaggcgtgcagcaggcgctgctgaagcttatcgaagggaccgttgccgccgttccgccgcagggcgggcgtaaacatccgcagcaggagttcctgcaggttgatacctccaagatcctgtttatctgcggcggcgcgttcgctggcctggacaaagtgatttcccaccgtgtggaaaccggctccggcattggttttggcgcgacggtaaaagcgaagtccgacaaagcgagcgaaggggaactgctggctcaggtcgagccggaagatctgatcaagtttggtctgatcccggagttcatcggccgtctgccggtagtggcgaccctgaacgagctgagcgaagaagccctgatccagatcctgaaagagccgaaaaacgccctgaccaagcagtatcaggcgctgtttagccttgaaggcgcagagctcgaattccgcgacgaagcgctggacgctatcgccaagaaagcgatggcgcgtaaaaccggcgcccgtggcctgcgctcaattgtggaagcggcgctgctggataccatgtatgacctgccttcgatggaagatgtcgaaaaagtggtcattgatgagtcggttatcgccggtcagagcaaaccgctgctgatctacggcaaaccggaagctcagcaggcatctggtgaataattaaccatttcactcaagcagttaacaaaaaggggggattttatctccccttttatttttcctgcattcccgccgttgaatgtgtggaatacatccccatatactggattacatattaacgacgatgcagtggagtgtggcgtcgtcggctacctggcggactttaaactaagagagagctctatgaatcctgagcgttctgaacgcattgaaatccccgtattgccattgcgcgatgtggtggtttatccgcacatggtcatacccctgttcgtagggcgggaaaaatctatccgttgcctcgaagcggccatggaccatgataaaaaaatcatgctggttgcgcagaaagaagcgtcgacggatgagccgggtgtaaacgatcttttcaccgttggaaccgtggcgtctattttgcagatgctgaagctgccggacggcaccgtgaaggtgctggtcgaagggctgcagcgtgctcgcatttctgcgctgtctgataatggcgagcatttctcggcgaaagcggagtatctcgactcgccggcgattgacgaacgcgagcaggaagtgctggttcgcacagctatcagccagtttgaaggctatatcaagctgaacaagaagatcccaccggaagtgctgacgtcgctgaacagcatcgacgatccggcgcgcctggcggataccatcgcggcgcacatgccgctgaagctggctgacaagcagtctgtgcttgagatgtccgacgttaacgaacgtctggaatatctgatggcgatgatggaatcggaaatcgatctgctgcaggttgagaagcgcattcgcaaccgcgtcaaaaagcagatggagaaatcccagcgcgagtactatctgaacgagcaaatgaaagcgattcagaaagaactcggcgagatggacgacgccccggacgaaaacgaagcgctgaagcgtaagatcgatgcggcgaaaatgccgaaagaggcgaaagaaaaaaccgaagcggaactgcagaagctgaagatgatgtcgccgatgtctgcggaagcgaccgtcgtgcgtggctacatcgactggatggtgcaggtgccgtggaatgcgcgcagtaaggtcaaaaaagacctgcgtcaggcccaggagatcctcgataccgatcactatggcctggagcgcgtgaaggatcgcatccttgaatatctcgcggtgcagagccgggtgaacaaaatcaaggggccaatcctttgtctggtgggaccgccgggggtaggtaaaacctcgctgggtcaatccatcgccaaagcgaccggacggaaatacgttcgtatggcgcttggcggcgtgcgcgatgaagcggaaatccgcggtcatcgtcggacctacattggctcgatgccgggcaaactgatccagaaaatggcgaaagtgggggtcaaaaacccgctgttcctgttggacgagatcgacaaaatgtcttccgacatgcgcggcgacccggcttccgcgttgcttgaggtgctggatccggaacagaacgtggcctttaacgaccactatctggaagtggattacgatctcagcgacgtgatgttcgtggcgacttccaactccatgaacattccggcgccgctgctggaccgtatggaagtgattcgtctctccggctataccgaagatgaaaaactgaacatcgccaaacgtcatctgctgccgaagcagatcgaacgtaacgcgctgaagaaaggcgagctgaccgtcgacgatagcgccattatcggcattattcgttactacacgcgggaagcgggggtacgtagcctggagcgtgaaatctccaagctgtgccgcaaggccgttaagcaactgctgctggataaatcgctgaaacacatcgaaattaacggtgagaatctgcatgattatctcggcgtacagcgcttcgactatggccgcgccgatagtgagaaccgcgtcggtcaggtgaccggtctggcgtggacggaagtgggcggcgatctgctgaccatcgaaaccgcctgcgtgccgggcaaaggcaagctgacctacaccggctcgctgggcgaggtgatgcaggagtcgattcaggctgcgctgacggtggtacgttcgcgggctgacaagctgggcattaacgccgacttctacgagaagcgtgacattcacgtgcacgtgccggaaggggcgacgcctaaggatggtccgagcgcgggtattgccatgtgcacggcgctggtctcctgcctgacaggtaacccggtacgcgctgatgtggcgatgaccggtgaaatcactctgcgtggtcaggtgctgccgatcggcggtctgaaggaaaaactgctggcggcgcatcgcggcggcattaagactgttctgattcctgatgagaacaaacgcgaccttgaagaaattccggataacgttatcgccgatttggatatccatccggtgaaacgaatcgaggaagttctgacacttgcgctgcagaacgaaccgttcggcatgcaggttgtgaccgcgaaatagtgattctgcgcaaattgcgctaataaaaatagggctggtaagtcatttcggacttgccagcctttttttgtgtagctaacttagatcgctggcaggggggtcatcgacaactgctgttgtaagggcatgacagtcctgatataactgctgcgcggtcgcactatgaaggactcaggtgcgatataaattataaagagaggaagagaacagtgaataaatctcaactgattgacaaaattgctgcgggtgcggacatttctaaagctgcagctggacgtgcgttagatgctttaatcgcttctgttactgaatctctgcaggctggggatgacgttgcgctggtaggttttggtacctttgctgttaaagaacgtgccgcccgtactggtcgcaacccgcaaacaggtaaagaaattactatcgctgccgcaaaagtgccgggcttccgtgctggtaaagcgctgaaagacgcggtgaactgatcggctttcccgtcagggaatgtgacgaagtacaagggcgcatcgtgagatgtgccttttttattgtcttttcagaccactttatgtgtgtttatcgccacttgtgggctgacaatcaccctgttttcttgtcaaaatacgtcctcacgcgcggcggccatcacgtgctatgctgcgcgagctaaagtcatctacagcggagcgttgttacaccatgatggacaacctacgcacggccgccaacagcgtcgtgctcaagattattttcggtatcattatcgtctcgttcattttgaccggggtgagtggttacctgattggcggtggcaaaaactatgccgcaaaagtgaatggccaggagattggccgtgggcagtttgaaaacgccgtcgccagcgaacgtaaccgtatgcagcagcagcttggcgatcaattctccgagctggcggcgaacgaaaactacatgaaaaccatgcgccagcaggtgctgaaccgcctgatcgatgagtcgcttctggatcagtatgcccgcgagctgggcctcagcatcagcgatgagcaggtgaagcaggcgatcttccagacccaggcgttccagacgaacggtaagttcgacaaccagcgtttcagcggtattgtcgcccagatggggatgaccaccgatcagtacgcccaggcgctgcgtaaccagctgaccacgcagcagctgattaacgccattgcgggtaccgacttcatgctgccgggcgagtccgatcagctggcggcgctggtatctcagcagcgggtggtccgcgaagcgaccatcaacgtaaatgccctggcggcaaaacagaccgccagcgatgaggaaatcaacgccttctggcagcagaatcaggcccgttttatggcgccggagcagttccgcgtcagctacatcaaaatggatgccgccagcatgcaggagagcgcctctgacgacgagattcagtcatggtacgaccagcacaaggatcagttcactcagccgcagcgcaaccgctacagcgtgattcagaccaaaactgaagccgatgcgaaagcggtactggccgagctgcaaaaaggagcggacttcgccacgctggcgaaagaaaaatcgaccgatattatctctgcccgcaacggcggcgatatggggtggatggaagatgcctctaccgtgcctgagctcaaagatgccgggctgaaagagaaaggccagctgtctggcgtgatcaaatcctcggttggcttcctggtagctcgtctggacgacgtccagccggcgcaggtgaagccgctggctgacgtgcgtaatgacattgcggcgaaagtgaagcaggaaaaagcgttggatgcttactacgcgctgcagcagaaggtgagcgatgcggccagcaacgataatgaatcgctggcgagcgcagcgcaggtcgccgggctgaaggtcgtagaaaccggctggtttggccgcgataacctgccggaggagctgaactttaaaccggtcgctgacgctattttcaacggcggtctggtgggtgagaacggcgcgccgggcagcaactccgatatcattaccgttgacggcgatcgcgcttttgttctgcgcattagcgaacacaaagccgaggcggtgaagccgctggccgaagtgaaggcacaggttagcgatatcgttaagcacaataaagcggaacagcaggcgaaactggaggccgacaagctgctggcggcgctgaaagacggcaaaggcgatgaagcgatgaaggcggctggcctgagctttggcgcgccgcagacgctttctcgtaccggccaggatccgctgagccagctggcatttaccctgccgctgccgcagcagggtaaaccggtctacggcgtgggcagcaatatgcaaggcgatgtggtgctgatagcgctggatgaggtgaaagccggcagcatgccggaagagcagaagaaggccatggttcaggggatcacccagaacaatgcccaaatcgctttcgaagcgctgatgagcaacctgcgcaaggcggcgaaaattaagctcggcgacagcatcgaccagcagcagtaatttcgcgtcgtctcgcaaaaatgagcaacacgatgtaatcctcaagggccgctttcgcggccctttccatttctgtgatttgccttttgtcgaccatccgcactgacgctatcgtgaccttgctgtctacacacaaggagatatcagcatgaaatatggaataaaagcactgatggccgcgggcgttctggtttttgcggtaggggtacagggggcgctggcggcacccgccagcggcaaagcggcggtgaataaagaaaatgtgcaggcgtcctcttcggcgaaggcggaagcggtgcccggcgagtctgacatcggggcgacaaaggtcagcattaaccgcgccagcgccgaacagctggcgcaggcgttgaatggcgtaggattgaaaaaagcccaggctattgtcagctaccgcgaagagtacgggccgttcaaaaccctcgatgatctgaagcaggtcccgggaatggggagcgcgttggtggagcgcaatttagcccatctgacgctgtaaattttatgccagaccttgcacagcggtgattttttgccaggataaagaggttgcatcaagtggtgtgacctcttacctcataaacaacaataacagaaaggcattggtgctatgcagacacaaattaaagttcgcggctatcatctggacgtctaccagcatgtgaacaacgctcgctacctggagttccttgaggaagcccgctgggacggcctggaaaacagccccgcgtttcagtggatgatggagaaaaacatcgccttcgtggtggtgaatatcaatattaactatcgtcgtccggcggtactgggcgatgtgctgacggtgagcagcaaactggagcaactcaacggcaaaagcggcaccctaagccaggtggtcaccctcaaccccaatggcgaagtagtggccgatgcgctgattaccttcgtttgtatcgatttgaaaacccagaaggcgctgccgctggaaggggaattgcgtgcgaaacttgaccagatgaacctgcgctgacaaccgtcgtgcgagtggcgggcccacggcaggtgatgaacccgtagccccggtaagcatcgcgccaccggggaatttgagtcaaagctccggtaaatcgatccccggagattatgcctgcgccagtccggttttttgctgcatcaccgccattaccccgaccttgtccgccagatactggttgagtccgtttgcgcgcaggttacaggcggcgcactggccgcagccatcgcccttaatgccgttgtagcaggtgagggtttcccggcgcaccagatccagctgaccccagtagtcggcgagcgcccaggtctcggctttattcagccacatcagcggcgtctcaaagcgaatgtctttcgccatccccaggctgacggcgtggtgcagcgctttgacaaactcatcgcggcagtccgggtagccggagaagtcggtctcgcacacgccggtgatgatggcttcggcttttacctgataggcgtagattgccgtcagggttaaaaacagaatattacgcccggggacaaaggtgttgggaatgccctcggcatcaggctgatagtccggtaccggaatgttatcgcgggtcaggctgctgactgccagttcgttgagcagagtgacgtccagcactttatgcgcgacggcgcccagtttcagggcgagttcgcgcgcaacgtcgatttccgcgcggtggcgttggccataatcaaaagtgacgcaatgcacttcatcatactgttgcagagcctgcaccagacaggtggttgaatcttgtcctccgctgaagacaactacggcgcgtttcatggcaattcctgactaaatgaataaaggcgatatggtagcgccagacgccctccatcaccagctctctcacgtcgacgaggccggcagccaggcgctggcgaagtcgaaccagccccgggcgttgaggcgcagaccattgacccccggtggcgcgctgatccgatagttatacttgaacagcggcgtcatgatggcgtcttccatcaggctgttaaatacgttgcgcagcgcatcgttgcggctgcgagcgtcgggctgagactgcaccgcgtctaatgtcgcctgcagatgagcatattgcgccccggtcagcaaattaggccacagcatatcgcagcgcagccactgttccagggcgtactccggcgcttcgccgatcagacggtcgcccatcatcaggtcggcctgccccagatgctggcagccttcccagtttttagcgtcgtggaacaggagcgtcagctcgcagcccagcagagccagacgttgcctcagctgttcggccatcgcatgtagctcgaccggcagatgatagagcagggtgagcctggccggcagcggtaccgcgttgtttgccggtccctgcgggatggaccatcccggcagcacctcatggcttggcgtaatcagatcctcctccagcggcagcgtatccagtagcgacgagtgatggattatcgacaccagccgctgggcctgcgctttgctaagccgagggctgtggcgcagggtcaaatagcagaagccaaggctgatacggttgctgacctgacgcagattatgcagctcttcgcgatcgccgatggtgatctgcaccggatggcggcagctggtgccgagatcgcggtcaaagagctgaggagtgatccagtactccaccgcctggatcagcggatgctgcaggtggtagcggggatggttttccaggcggacgagttccggactaaaccgcttcaggcggaacggtccgcagccaatggccggatcgtcgggatgcgccagcacgctgcagtagctggcgaggcggaacggcagccagtagtcagggcgatgcagggttattgttaaacactgggcatgggtgacatcgatacggctgatgctggcgaagagggtccgcaaggcgggcagctcaagcagcagcagtaaccgctgtcgcaactgcgcggtttccaccgtatcgccattgtgccagcacagcgtggagcggatataaaaatgccagcgcaggccgtccggggagacctgccagtggtgcgccagatcgccgatcggcatattgtcgccttcgtcgaagcgcgtcagcccggcatagatttgtccggccagatgctgctcggcgcggccggggagaaagccgggacgcagcggctccagcgggcgatagtaaggaatacgcagcgtgggggtattgttttgccactgaccgccgaggaagggatggagcagggctttcagctccaccggggcaagctgcgccagctccagcgcggtttgttgctgaccgttgttcagcgcctgctccatcatctcgttgcgcagactttccggggttttgtgaaataagagctgtccgcgtttgccgcgcccggagctggcctgccagcttagccacccggcctcctgcgcctgacgcagcagagtacggacgtggcgctcgctgcaaaaacagcgctccgccagttcgccgacggtgacctgctgcggcgccccggctgatggttgccataggcgctggtattgatttaaacggtgtaagagtcgcatgggggccgtcgtccaccgggccgctgtaaacccggaacaattaataatatctattcactattacttccgtatatcccaggtgatactgcaacacaagcgaagcccatcacacatcggggaatataccatggcaaaactggcggcatttgatatggacggcaccctgctgatgccggaccatcgtcttggagaaaagacgctttccgcgctgaaacggctgcgtgagcgcgatatcaccttgaccttcgccaccggccgccatgtgctggagatgcaccatgtgattggcgaattttcccttgatgcatttctgatcaccggcaacgggacgcgcatccattcgctggaaggggaggagctttatcgccaggatctcgctcccgaggcggcagaagcggtgctgcacggcaaatgggatacccaggccagcatgcacgtctttaacgatggcggctggttcaccggccaggcaaggcctgaattgttgcaagcgcatgtattcagcggctttcactatcaactgtgcgatctgaagcgcatgtcggcgcagcatgtcaccaagatctgtttctgcggcgatcatgacgatttgcgccgtctgcggatccagctgaatgagacgctgggcgatcgcgcatttctctgcttctcggcaatggactgtctggaggtgctgccggttggctgcaataaaggcgcggcgctggcggtgctcagccagcatttaggcttcaccctgcaggagtgcatggccttcggcgatgcgatgaacgaccgcgagatgctgggcagcgttgggcgggggttcatcatgggcaacgcgatgccgcagctgaaagccgagctgccgcatctgccggtaattggcgactgtcggaatcaggcagtctcccattttttaactcattggctggataatcctgatcttccttattcccccgaatagagagacccttccagcaagccagataggcttctatctggctttttttatcgcctttcgaccagaccggcgatctccgcctgccagggcgcaatatcgccgatattgtccgccacccactgcgggttgtaatagctttccaggtaacgctcgccgctgtcgcacaggagtgtcactatcgagccggtgcgaccttcttcgcgcatccgcgcggccagctgcaatacgccccacatattggtgccggtcgaggcgccgaccttgcgcccaagctgcgtttccagccacagggcggtggctacgctcgccgcatccggcacgcgcagcatctcatcgacaacgtcgggaataaacgacggctcgacgcgcggccgtccgatgccttcaattttgctgccgaccgggctgcgcaggctggcgtcgcgggtctgccagtaatcgaggaacaccgaattctgcggatcaacgaccatcagctgcgtctcgtagccctggctgcgaatatagcggccaatggtcgctgaggtgccgccggtgccggcgctcatgacgatccatgacggctgcgggtgcggctcatggctcatctggcggaaaatactgtcggcgatattgttgttgccgcgccagtcggtggcccgctcggcgaaggtaaactgatccatataatggccgttcagctcgcgggccagcgtttcggaagccgcgtagatttcgccggcgctctgcacaaaatggcagcgtccgccgtagaactcgatctgttcgattttgcgcttggcggtgcaggaaggcatcacagcgataaacggcagccccagcaggcgggcgaaataggcctccgaaacggcggttgaccctgaggaggactctataattggcgtgccttctttgatccagccgttgcacaagccatagagaaacagcgaccgcgccaggcgatgcttcaggctgccggtggggtgggtgctttcatctttcagatacaggtggatgcccggaaaagcgggcagcggcagacggatcaggtgcgtgtcggcggagcgctgatagtcagcgttgatttcgctaatggcatgtttaacccaggcgctattcatcgtgatttcctgtttgtcattttgtgcctagcttagcggaaagcgcaggaaaaattgttgccatttaacctgtggattaccattatgagagcaaaattttctctgaggatgcccaatgctagataaaattgaccgtaagctgctggcgctactgcaggaagattgcaccctctctttgcaggcgctggccgatgccgttaatctgaccaccacgccctgctggaaacgcctgaaacggctcgaagacgagggtattctccgcgggcgcgtcgccctgttggacgcggaaaaggtggggctggggctgacggcgttcgtcctgatcaagactcagcatcatagcagcgactggtactgtcagttcgtgagcgaagtgacgcagatggcggaagtgctcggcttctggcggatggcgggggagtatgactacctgctacgggtgcaggtggctgatatgaaacgctatgacgacttttataaacgtttagtgaacagtgtgcctggtctgtcggatgtcacttcgagttttgccatggaacagataaaatataccaccgccttgcctgtcgaataacggtattgcgccgtaacccattacaaaatcaggattttattgcttgcgattatttgctcaactcagctggtacttccgccgggagtggcgccgctatcttggcgcaattgccctgctggtcattattgccgtcctgcagcttattccgccgaaggtggtgggcattgtggtcgacggcgtgacgcaacaacattacaccgcggagaaggtgtggatgtggatcggcgcgctggtgctgatcgcggtgatggtctacctgctgcgctatgtctggcgcgtgctgttgttcggcgcttcttaccagttggcggttgagctgcgggaagatttttaccggcaactgagccgccagcatccggcgttctatttgcgccatcgcaccggggatcttatcgcccgcgccaccaatgacgtggaccgggtggtgtttgccgctggcgaaggagtattaaccctggtggattccctggtgatgggctgtgcggtattgattgtaatgtcgacgcagattagctggcagcttactctgctggcgctgctgccgatgccgctgatggccctggcgatcaaacgtaacggcgatgcgcttcacgaacgttttcgcgttgctcaggcggccttttccagcctcaacgatcgcacgcaggagagcctgaccagcatccgcatgattaaggcgtttgggctggaggatcgccagtcggcgcagtttgctgccgatgctgccgataccggcgcgaaaaacatgcgcgtggcacgcattgacgcccgcttcgaccccaccatctatatcgccatcggggccgctaacctgctggccatcggcggcggcagctggatggtgatccacggcagcctgaccctgggccagctgaccagcttcgtgatgtatcttggcctgatgatctggccgatgctagcgctggcgtggatgtttaacatcgtggagcgcggtagcgcggcctatggtcgtatccgcacgatgcttgaagaggcgccggcggtggatgacgggaccgaggcggtgccggcaggccgcggcgtcctgcaggttgctatccgcgatttcatctatccgcaggcgagcaaaccttcgctggagcaggtaaattttactctccagccggggcaaatgctgggcatctgcgggccgacgggcgccggcaaaagcaccattctggcgctgctgcagcgccattttgacgtcactcacggcgagatccgctttcacgatctgctgctgccgattctgcagctcgacagctggcgcgcccggttggcggtggtcaatcagacgccatttttattctccgataccgtcgccaataatatcgcgctgggaaaaccggacgcgacgcaggcgcagattgagcgggttgctcaactggccagcgtgcatgacgacattctgcgtctgcctcagggctacgagaccgaagtgggcgagcgcggcgtgatgctctccggcggccagaaacagcgcatctctattgctcgcgccctgctgctggaggccgaaattttgatcctcgacgatgccttatcggcggtggatggccgcaccgagcaccagatcctgcataacctgcgccagtggggggaggggcggacggtcattatcagcgcccaccgcctgtcggcgctcaccgaggccagtgaaattttggtactgcagcatgggcatattgcccagcgcggccgccacgaggcgctggccgtgcagcccggctggtaccgcgacatgtatcgatatcagcagctggaggccgcgctcgacgaggttccgcagacgcaagaggaggccctggatgcgtagctttaccgaactctggccgacgcttaaacgcctgctggcctatggttcaccgtggcgcaagccgttggccatcgcggtggcgatgatgtggattgcggcggcggcggaagtgagcggcccgctgcttatcagctatttcatcgacaacatggtggcgaaacatacgctgccgctgaagctggtggccggtctggcggtagcctatatcggcctgcagctgctggcggcgctcctgcactataaccagtcgctgctgtttaaccgcgccgcggtcggcgtcgtccagcagttgcgcagcgacgtgatggatgccgccctgcatcagccgctcagcgagtttgatacccagccggttgggcagcttatctcacgggtaaccaacgatacggaagtcattcgcgatctgtacgtgacggtggtggctacggtactgcgcagcgcagcgctgatcggcgcgatgctggtggcgatgtttagcctcgactggcggatggcgctggtggcgatcgcgattttcccggcggtgctgatcgtgatgattatctatcagcgctatagcacgccgatcgtgcggcgggtgcgcgcctggcttgccgacatcaacgatggcttcaacgaagtgatcaacggcatgggcgtcatccagcagttccgccagcaggcgcgctttggcgaacggatgcgcgaggccagctatgcccactatctggcgcggatgcagacgctgcgcctggacggttttctgctgcgcccgctgctgagccttttttcctcgctggtgctgtgcgggctgctgatgctgttcggctttagcgcggtgggcacgatcgaggttggggtcctgtacgcgtttatcagctatcttggacgccttaacgagccgcttatcgagctgaccacccagcagtcgatgctgcagcaggcggtggtcgccggcgagcgcgttttcgagctgatggatcgcccgcgccaggcgtggggtacggatgacgcgccgctgagcagcggtcgggtggaaattgaccatctctcctttgcttaccggggggaccgtctggttctccaggatatcacgctggatattccctcccgcagcttcgtggcgctggtcggacataccggcagcggaaagagtaccctcgccagtctgatgatgggctattacccgttaacccacggcgagatccgcatcgatggtcgaccgctcgcatccctcagccacagcgcgttgcgtcggggcatcgcgatggtgcaacaggatcccgtagtgctggcggataccttctacgccaacgtcgcgctgggccgggacatcagtgaggcgcaggtttgggaagcgctggaggcggtgcagctggcggcggtggcgcgcagcatgagcgatgggctgtacacccaactgggcgagcagggcaataatctctccgtcgggcagaagcagctgctggcgctggctcgcgtgctggtggacaccccgcaggtactgattttggatgaggcgacggcaaacatcgactccggtaccgagcaggcgatccagcaggcgctggcgaaggtccgccagcataccaccctcgtggttattgcccatcggctgtcgaccattgtggaggccgataccatcctggttctgcatcgaggtcaggctgtcgagcggggcacccatcagcagctgctggcggcgaaaggccgctactggcagatgtatcagctgcagctggccggcgaagagctggcggccagcgccagagaggagtcgctcagcgcctgatgcaccaccagcaggcagggaacgctgggcggcctgcgatggtgcaaaaacgttacatcaaatgcaccgttgtggtgcatttttgcgcgccaggcgccgttgcgcaggatattgcctgacctgtcccctgttttttgccatcaaagggccgctttgcggccttttttcatttctggcatagcccttgctttatatccatcgtgttagctgcggccattaccgaatactgactggaggggacttatgaagctggttaccgtggtaatcaaaccattcaaactggaagacgtgcgtgaagctttgtcttccatcggcattcagggcctgacggtcactgaagtcaaaggatttggccgtcagaaaggtcacgcggagctctaccgcggcgccgagtatagcgtcaactttctgccaaaagtgaagattgatgtggcgattgccgacgatcagctggatgaagtcatcgatgtcatcagcaaagcggcttacaccggaaaaattggcgacggcaaaattttcgtcgctgaattgcagcgcgtcattcgcatccgtaccggcgaagctgacgaagcggcactgtaatttccagaccacacagtgatggggaacgaaacaatgaaaatggcaacaatgaaatcgggtctgggggcattagcccttctgccggggctggcgatggccgcgcctgcggtggcggacaaagccgataacgcgtttatgatgatttgcaccgcgctggttctgtttatgactatcccggggattgcgctgttttacggcggcctgatccgcggtaagaacgttctgtccatgctgactcaggtgattgtcacctttggcctggtctgcgtattgtgggtgatttatggctataccctggccttcggcaccggcggcagcttcttcggcagctttgactgggtgatgctgaaaaatattgagctgaaagcgctgatgggcaccttctatcagtatatccacgtggcattccagggctcgttcgcctgcatcaccgtcgggctgattgtcggggcgttggcggaacgtattcgtttctccgcggtactgatcttcgtggtggtgtggatgacactctcctacgtgccgattgcgcatatggtttggggcggcggtctgctggcgacccatggcgcgctggacttcgccggcggcaccgttgtgcacatcaacgccgcggtcgccgggctggtgggcgcctatatgatgggcaaacgcgtgggcttcggcaaagaagcgttcaaaccgcataacctgccgatggtgttcactggcaccgctatcctctacgtgggctggttcggcttcaacgccggctctgccagcgcagcgaatgaaattgcggccctggcgttcgttaacaccgtcgtggcgaccgctgcggctatcctggcgtggacctttggcgaatgggctctgcgcggcaaaccttcactgctgggcgcctgctccggggcaattgccggtctggttggcgttacgccggcgtgtggttatatcggtgtcggcggggcgctgatcgtcggtatcgcctctggcctggcgggtatctggggcgtgactgcgctgaaacgctggctgcgtgtggatgatccttgcgacgtcttcggcgttcacggcgtctgcggcatcgtcggctgtatcctgactggtatcttcgcggcgacttctctgggcggcgtcggttatgcggaaggcgtcaccatgggccatcagctgctggtgcaactggaaagtatcgccatcaccgtggtctggtccggcgttgtggcgtttatcggctacaaggtggcggatatgaccgtcgggctgcgcgtgccggaagagcaggagcgcgaagggctggacgtcaacagccatggcgaaaacgcctataacgcctgataaaaaagccattctctcctgatagcgaaaagcctcccgtccgggaggctttttttatgcgttgcggttgcgcatcaccccttcctgaaccgttgaggcaaccagcgtgccatcctgggtgtagaattcgccgcgaacgaagccgcgggcgctggaggccgaggtgctttcgacgctataaagcagccattcgttaatattaaacggccggtggaaccacatagagtggtcgatggtggcgacctgcatgccgggctcaaggaaaccaacgccgtgcggctgcagcgccaccggcaggaagttaaagtctgaagcatagcccagcagatactgatgaatacgcagatcgtcagggactgcgccgttggcgcgcagccagacctggcgcaccggttcggcgatatggcctttcattgggttatgaaactccaccggacggatctccagcggtttatcgcagaggaatttgtctttcacctgcggcggcaggagatgcgccagcttgcgagcgatatcggtttccgaaggcaggccgtcaggggagggggcggccggcattgctttctgatgctcatagccattctctggcgcctggaaggaggcggtcatatagaaaatcggcttcccgttctggatggcggcgacccgacgggcgctgaagctgttgccatcgcgcagcacctccacatcgtaaacgatcggcttctggctatcgccggggcgaagaaagtagctgtgaaacgaatgaaccagacgctcaacgggcacggtctcttttgccgcatacagcgcctgacccactacctggccgccaaaaacctgacgtaaccccaggtcttcgctctgcccgcgaaacaacccttcctcaattttttccagatctaataatgccagcaggttagagagtgcctgactcatacttatcctcaattaacaatagcggcgcagcgcgcgtaatgtggccaagtataacctggaatcgcaagtggtccgatgggtgtaataatctgaataacgaccagttaacaggaacaaatctgagatctgtgccacacttattgacgacacgaaagttcctgccggcgaagcggcggaacatcctcctgggtattaagggatgataaggagaacatcatgaaatttgcctatatgtttagtgccttagccgtcgccgcgacgctgaccgcctgtgctaatcaccactcgaacaattcttcgacgcaggcggccgcgcccgacccttacggtatcgcgacgctgagcgtggcgcagcagcagccgagcgtcacggggacgattaatatccgccagagaatcgctttaccgccggatgcggtactgacggtgaccctgtcggatgcttctctggcagatgcgccagcccgcgtattgtcgcaaaaagcggtgcgtaccgaaggcaaacaggcgccatttaactttgcgctgccttacaacccggcagatattcaaccgaacgctcgcattctgctaagcgcggcgatcacggttaacggccagttgatgtttattaccgataccgtgcagacggtaataaaccagggcggcactcatgccgacctgacgctggttccggtccagcagaccgccgttcctgtcgcccagtaagctcgctacgcccccggatgggggcttttttttgccttcaataaacccagcgataatgctggagatcgatatggccgctgccggagacctgcacaccctcggccagcagcgcctgacgctgccgctgtagatcggggccggtgagggagatatcgccatggcgattgaccacccgatgccatggcagggtggacccttccggcaggcgcttcaatacgccgcccacctggcgcgccgcgcgcggtgaaccagccagccgggcgacctcgccgtaggtcgtgacatacccttccggtatcgacgccacgatgtgccagacgcgttggggaaatgtgtcgtgcggagccattttctgtcctgttaccggcaaaacgtcagcataagcgctaagccaggagctgtacagccggcctgggtcaggcggcctgttcgacggtgaacgtcagagcgaggccgaggatctgcatgccatggacattgtcggaggctgagctggcgatgagactttcaagaaatttcaaccgctgcgaagtggcgttgatgatcagcctcgcgcgcaggcccggcatggttaacgacgagatagggtacaccacccgaccgctgatatagaccggcagcttgcgtagctccacctggcgcagcacgccgacggtggaatagagcagcgccagcggcgtaaccgcccgcaccggcgcgggactgatggtcgcgaagtcgagcattttttcaggacgcaggtagtttacgccctgaaaggcgatggtcatcccttcaatagcaggtaaaggcagagtgatggtctgtggtgatgagtcagtcattcgattaccgtcgagacaatgtactggtgataaaagaggacgaagaggataagtatggtggataacccgtatgtgtgctgagcgcgggctcgcaatctcacaggctgaccgtgagtggctggttttattcgcgttattgcgcaataaaccagcaggcggacggtgtgagcttgcaattcaccaggtcagcagggataatgcgccagcgcgttaggcaactaacgctctcaatgggggctctgttggttctcccgcaacgctactctgtttaccaggtcaggtccggaaggaagcagccagagcagacgacgtgtgtgccgggatgtagctggcagggcccccacccatttctcccgcctggtgtttcccttatatttgtccggtttttactcctgcaataattaatttctgataaagatcgcatattagtttttgttgttaaaaccccctgcttttattccataatatttacttgtcataaatctgaaatactactgaaatattaatgtcatttgcatgtcataaataaagcgcatcttactgatgggaatttgttgccaggctcatgctgtaaaatatatctctggatcagcatgttaacttcgtgtattaattatgatgattttattgcacgggaagcgtagctatgaccacagtggttttgaatgtaaaaattgacgcagagctaaaagaaaagttgcgtcattatgcggaagttaataacgagaacctgggaacggcaacggaaaagctgctgcagctggcttttcagctggaggagtcagcaggtgaggcgggggtgacggaagaggacattgacagccagcataccgaagaggaagcgacgccacttacccctaaagaaatcaaagcattaagaaaacttctgaagaagaaaaaatgaaacaacaattctctacagccagcaactatagcgaagcttgcgatatgttgcgctcaggatacgtaaaacacgtccgcctgaactggaatatcggtagtgatgagttctttcgcattgcttccgactggtgtgacaccggcgctaaaatcaaaaaagatgaagatggctttattatttccctgaaagggtttcctattccgcgccagcattaatgaaattgccttctttctgtcattgggttgccataaccagagggcaggatagccaggcaattttataaaaacatctcatatacctcatggatgaaggtcatttgacgggctgaagtcagcccgtcgctattttcttatattatttttcgcaaacgtgtattttccttctgttcagcaaggctttgccacagcggttgtagcgtggagaaggcccggcgcaatgcttcatccggcagcgtaaacggcagacgtaaatagcgatcgaacgccccttccagcccaaaccgcgtaccggtgccgatatggatcccctggctttccgcacgcgcagagaacagggtggccagcatgtcaggaagttccacccaaaaagagagcccaccttccggtggcgaaaaccgccagcggggaaaatattccgccatcagcgtttcgcacatgtcccggcgcgccttgagcatattccgccgcggcggcagcagtgtggcggcattttccagtagccagctgcaggccagttgctccagcagcggcgtacccaaatccagcgaatcgcgggcctgaataagcgaggcgatggtccgcgcgctggcgcggatccagccgatacgtagtccccccagaagcttttcccggccgaaccaatggtgagcaccgcggcatcgggattgaagctggccagcggcgggggcggcggcgcgttataccaaaggtcggccatggtctcgtcgattaccagcgttgttcgcgtcctggcggcgatgtccgcaacccgctggcgggtgggggcatccatacagcgtccggtggggttgtgaaaatccggcatcagccacgccagccgcggcgcagtctgcgcaatagtcgccgccagtccatcgcagtcccatccctgctgcggaagcgcaaccccgacggggcggcaggaggcgccctgaatggcgctgatggccatcggataggtgggggcgtcaataaccacccgatcgcccggcccggtgaacaggcgcaggatcagcgcgaaggcgctgagggcgccgttgaccaccatcacctcatcgggccgcgtcggcagaccgcgttcgctgtagcgccgggcaatcgcctcccgcagcaccggcagcccctgctggtcatagccagtctgtgcgagatagggcggcagcagggtcatagcgtgctggaaggcctgatggacctccggcccggcgctgagggcggcggtagatagattaagcgtagatgagatgccggcaggcagaggaagatcggcggggcgttccggcaaaacaatgcgtgacccgctcccctggcggctgtagagaaagccctcctcccgcaactggccgagggcgctggcgatggtggtccggctgacgttcagggccgccgccagctcgcgctcgccgggcaggcgcgtttgcagcgtcaggcgaccatcaaggatcagcaggcggagcgcttccgccagctggcgccatagcggcgtgcgtgagctggtctcctgccagttgccgagcaggcgtaccagcgattgggttccaaagcgtcgggctgacatagcgatccacttttccaaaactggccattaattatcagtccatttttgctgatgatgagggcattcgcaatgatgttgaggaaaaaatatgcttcgtcgcctgctgcagttatatattggtctggtgctttacggcgtgtccacggcgctcttcgtgcatgccaatctcggcgccgatccgtgggatgttttccatctcggggtggctaaacagctgggtatcagtttcggtacggtgattatcctgaccggcgcggcggtactgctgctgtggatcccgatccggcaaatgccggggctcggcacggtgagcaatgtcatcgtgctgggactagcggcggacgccacgctggccgtcctgccgccgctggagtcgatggtggcgcgcagtgcgctgctggtaggagcgattgtgctgaacgctatcgctaccggaatgtatattggcgcgggctttggccccgggctgcgcgatggcctgatgaccggtctgcatgctcgcactggttggtcactgcgcggtatccggacggcgatcgagctttccgtactgctgattggctggctgctggggggcaaatttggcgtcggaaccgtcatctacgcgctgtcgattgggccgctgatccagctgtgcctaccgtggttcagccagcccgtcagccgcaacgcggtcagccctccccgggaaatagtctcctgaattaacccatcgccctcttcatcacggagagggcctttcatcgcttacaggccgctcaggccatgaagcatcatgtagatccccaccacaataatcagtaagcctgagaaccagggcgccttgcgcgagaggtcgttaagccacggccagcggcgggtggcatgtttaaggctcagggcggcgatggccccggaagccaccagcgtcagcgccagaccaacgctaaagcccagcaccagcgtggcgcccagcgagaatttcttcagctgtaaacagataagcagcacggtaatggacgccgggcaggggatcagccccccggtcaggccaaacagcacgatctgcccggtcgtcacctggcggccatcaaagcgccggttgatctcctgagcatgagcccgctgatgcgcgtcctgccactcctccgccaccagcggcgcggcggatgaggacgcatggtgatggtcatggcggtgatcatggtcatggcggtgatcatggtcatggcggtgatcatggtcatggtggtgatcatgttcatggtggtgctcatgttcatggtggtgctcatggtgcgtgtgaggctgcgattcgcgccaggtgcgccagagcatccagcaggcaatcagcacaacgacaatccctgagaccagctgaaaccagggttcagaggtttgggcgttccagccgcggccaaaccacaggccggccatggcgatcagccagaccaccgccgtatgggaaaccgtggccgccagccccagcagtaccgcctgttttaacgttccccgtaccgccacgataaaggcggccatcatcgtttttgaatggcccggttcgaggccgtgcagcgcgccgagcagtattgcgctgggtataaacagccaggcattgccctgctgcagaagggaagtgaaatcgttcatatcgggatccttgccaaaagtgcgattatcctactccccccagtagtaaaatactaccccccagtagataaagcggctaataaaaaggatcatggtatgctggcaggcgttgctgaccacgcaggtcggtaatcccggacagaatgaaacggtggatcgtgcaatgtcacatacagttcgacacaaaaagatgttactgacccggctgaagaaaattcaggggcagagtaccgcgttagagaaaatgcttaatcgcgagcatgagtgcgctgaaatattacagcagctggcggcgatccgcggcgcggtcaacggcatgatgctgcaggttattcaggggcatcttaccgaccatgtggtgaaagagcctgacgagacgcagcgcgaagcggatctggagacggtgatgcaggtgattaaatcctatctgaagtagcgccccctgacgttccgctcaagccacccgccgcttaatgcgcatggaggttatgctctgcccacagaatgaactgctcttttggcagcgctttgctgtaaagccacccctgggcgtactgaacgccatgctggcgcagccagtcgcgctggctttcggtttccaccccttcggcgacggtggccagattgagcgctttggccatttcaataatgtgcggcgtcagcggccggtactcgagggtatcgacaaaagatttatcgattttcagcgtgtcgacgtccagtttctgcagatagctcaggctggagtagccggtaccgaaatcgtcaatcgagatccgatggccagcctgacggtagtgagcgatcaccggcatggtggtctccgggtcgacaaacccgcgctcggtgatttcaaggatgatctgttcggcggcgatcccccagtgctgcagctgatcgtgcaacaacgtcggtagggtgggcgagcgtaaatcatctaccgacaggttgatggatatgtgcacttccggccgctgccgcagccagggaccgagatcggtaaaaattttcctgacgatatcttccgtcagctgcgtaatcagcccggtctgctcggccagaggaataaaaatatccggcgataaaaaggtgccgtcgggttgctgccagcgggccagcgcctcggccccggcgattttcccgtcctgcaacgagattatcggctgatagtaaacctgaatcgcttcggaattgagggcgtccagcatgctgttgcgcggtgagcgcaggtgccttagcagacgcagcagcagccaggtggcgagcaggctggtgaaaatgccggcagggagccagaagaacagctgctgtcgaatgcgctgctgcagcggcaaggttgaagaccaggttacgatgccagagcccagctcgggaatgcgctggatccggtagactgtgttatccagagtaagcatatccacatgcggatctttaatgcgttgccagactttcgccggcagcggctgactgctgatcaccattttctggtggtccaggccaaacagcatggtatggatcttctcttcgctggcgggaacgacatcaataaaggagacggggtcgatcatcaccatgtgctgccggctgcccatggccgtcatctgatgatcgaggccaagatcgttaattgaggtcagccaggtgcgatagccgtcgggggcaatgtggtccggcggggggaaggtgaccgcgacgctatggtcttccagggaggagcattgcggcacggaatcacgcagccagagcacttcctgaatgtagcgatgggtataggcgatgcggcggagcgtaagcagatgttcagggctacaggaggcggcggtgtgtgcgtcagcctctcgtaacgcttcccgggcctggtcggcaacctgcagcgtccgaacgacgatacggttggaatagtcatccagttcacgatagaactgcattttggcctgccgcgccgcctgccagatgctgagtgaaatgggcaggatgatggccagtatcagcactcctgtaaacagcgccatcagatgccgggtcctcatgcctgtgtccttatcgttcgccgggtgtcatcagtatatgcgaaagataattcgggcgcagcgggagaaaacgcgtcgtttggggaaaaagccggcatcacaataggctgcgatgccgggagagaaggatgattccgatgtagcagaataaaaatgagggtgtgaatgccgggcagggtgtgttccggcattcagtcgcagcatacgctgcgcagatgacagcaatatgttagctagtgtgcatccggcgccgggatatcagcgctgatgcgcaggtcgttctcatcaaacaccatgcagaagcgctcatcgaaagccagattaattttctgccaggggcggaaatggacgtcgccgggcagcagaaccttgacgttgtcgtggccgtagcactggccgaacagataggtattgttgcccagacgctccaccacttcacattgaaactccaccacggtaccggtggtgatttccggggtgaggtgctccggccggatccccagcgtcaccgcagcgccgggcttcagcggctgggtggcgatattcagggccagctgatggtcctgcgcgagggtgaccgttaagcgttccggctgccagtcgctgacgatagccggcagaaagttcatcttcggcgagccgataaagccggcgacgaatttgttgaccggattgtagtacagcgccatcggcgaacccatttgttcgactttcccgtagttcatgaccacgattttatcggccagcgtcatcgcctccacctgatcgtgcgtgacatacaccatagtggtcttcagctcctggtgcagacgggcaatatgcaggcgcatatcgacgcgcagctccgcatcaaggttagagagcggctcatcgaacataaatacccggggattacgcacgatcgcccggccaatggccacgcgctgccgctggccgccagagagctgcttcggtttacgatccagcaggtgcgagagctgcagcgttttagccaccatttccacctggcgacggatctccgttttcggcactttattcaccttcagcccgtagcccatgttctctgccaccgtcatgtgcggatagagcgcataggactggaagaccatcgccacgccgcggcgggcgggcacgacatcattcatcacctcatcgccgatcagtacttctccttcgctgacctcttccagcccggcaatcatgcgcagtagcgtcgattttccacaaccggaagggccgacgaagacggcaaactcgccatcttcaatatcgagattgacctggtgcagcgtcaccgtgctgccgaaccttttggtgacattcctcagtcgtatattggacatccacattccccggagtgagtagctgttatttgccgttggcttatcgctatgttgagtgtgatttgtattacgtgtaacaaatcggtgtgacgatgttcaacagcagtaaaatcatgccctgactataacttccgcggattttgcgccatacagggacgtttcatttctgcaaggatgatcacacaactggcagcttatggtagttttatcaacgatcaaagcgtagcgtataacaaaagcgcatcagaacatgttttccaaataatacggcagtttgaaaagatttatttttctaactggcagacggaattcaaataaaaaccattaaattgttataccttcacatgaggttgataatgaaaaagaacacgcttgctgcactgatccttaccaccctggcggcgggacaactcgccagcctgcaggcgcatgccgccgggcagctcaacgtctgggaggacattaaaaaatccgctggcatcaaaaccgcggttagcgattttgaaaagcagtacaacgtgaaggtcaatctccaggagatgccctacgcccagcaactggaaaaactgcgcctcgacggcccggcgggcattgggccggacgtgctggtgatcccgaatgaccagctcggcggcgccgtggttcagggactactctcgccgctcagcgtcgatcaggcgaaacaggatgcctttacgccagcctccatcaatgccttccgcatggacaacgcgctgtatgggatcccgaaggcggtggaaaccctggtgcttatctacaacaaggacctgatcgacaagccgctggacagcctgcaggcctggctggactactcgaaaacccagcgcgagcagaacaaatacggcctgctcgccaagtttgaccagatctattacagctggggggcgattggcccgatgggcggctatatctttgctaaaaacgacagcggcggctttaacccgcagcaggtgggtctcaatacccccggcgccgtcgaagccgtcaccttcctgaaaaaattctatgccgagaaggtctttccggcggggatcctcggcgataacgggctgaatgccatcgattccctgtttaccgagaaaaaagcggcggcggtgatcaacggcccctgggctttccagccgtatgaagccgctggcattaactatggcgtggcgcccctgccgaccctgccggacggcaagccgatgagctccttcctcggcgtcaaaggctatgtagtatcgacctggagtaaagacaaagcgctggcgcaacagtttatcgagttcatcaaccagccgcagtatgtgaaagcccgctatgtcgccactggcgaaattccgccgctgaaggcgatgattgacgatccggtgattaaaaacgaccaaaaggccagcgccgtcgccatccagtcggcgcgagcggtggcgatgccgggcattcccgagatgggggaagtgtgggggccggccaacgccgcgcttgaactgagcctcaccggtaagcaggcgccgcaggccgcgctcgataacgcggtgaaacagatcacgatgcagatcgaagcgatgcaggccagcaatcagtaattcaccgtcacgtgaagtcaccgagcgggagggggacctcccgtttgtagaaggagtcgagtgtgagcatccattccagcgaaaattttagcgacgcacgcgggcccgggcgccatgcatggtgcggcctgctgctggcaatcgtgccgggtttcggtcagttttatcatcgccagtggctgaaagggctggtcttcctggtgctgctgagcagctttatggggattttttatgatttcctgcgtgaggggttgtgggggttatataccctgggtgaagaggtaccgcgggataactctatcttcctgttagccgaggggattatcagcgtgctgatcgtcgctttcggcgtgctgatctattttctctcgctgcgggatgcgtggctcaacggcaaaaaacgcgatgaggggatcgccctcaacagcgtgcgtaagcagtaccagatgctgctgagcgacggctttccgtacctgatgatcaccccgggctttattctgctggtgtttgtggtgatctttccgattctgttcggtttcgccatcgccttcaccaactacaacctgtaccacaccccgccggcgaagctggtggactgggtggggctgaaaaactttattaatattttcaccctctccatctggcgctccactttcctggatgtgctgcagtggaccgtggtgtggacgctgctggcgaccaccctgcagtgtacggtgggcgtgttgttggcgattctggtgaaccaaaaagatctgcgctttaagccgctgatccgcaccatctttattttgccgtgggcggtgccggggtttgtcaccattctcgtttttgccggtatgttcaacgactccttcggggtcatcaacaacgcgatcctgtccttttttggcatcagtccgaaggcatggctcaccgatccgttctggaccaaaacggcgctgatcatgatgcagacctggcttggcttcccgtttgtctttgccatgaccaccggcgtgttgcaggcgatcccggacgatctgtatgaagcggcgacgatggacggcgccagcgcctttacccgtctgcgcaccatcaccctgccgctggtgctgtatgcgatcgcgccgatcatcatcacccagtacaccttcaactttaataacttcaatatcatttacctgttcaacaacggcggccctgcggtggcaggctctaacgccggcgggacggatattctggtgtcgtggatctataagctgacgatgtcttcgtcgcagtacgccatcgcggcgaccatcacgatcctgctgtcgatctttgtcgtcggcctggcgctgtggcagttccgcgccaccaaatccttcaaaaatgacgacatggcgtaagggaagcaacatggctcaatcacccagtattaaacgcgaaaagtggatccggctctctctcacctggctggtggttattctggtctcagtggtgattatctatccgctggtctggacggtcggggcgtcgctgaacgccggcaatagcctgctcagtacctcaatcattccagaaaatgtgtcgttccagcactatgccgatctgttcaatggcaatgtgaattacctcacctggtactggaactcgatgaaaatcagcttcctgaccatggtgctgaccctgattagcgttagctttaccgcttacgccttctcccgcttccgctttaaagggcggcagaacgggctgatgctgttcctgctgctgcagatgatcccgcagttttccgcgctgattgccatctttgtgctgtcgcaactgcttggcctgataaacagccacctggcgctggtgctgatctacgtcggggggatgatcccgatgaatacctggttgatgaaagggtatctcgacgcgatccctaaagacctggatgagtccgctcgcatggacggcgccagcagctttcgcatctttatcgagatcatcatgccgttgtcgaggcccatcctcgcggtggtggcgctgttctcgttcactgggccgctgggggatttcatcctctccagtaccatcctgcgtaccccggataaatacacgctgcctatcggtctgtataacctggtggcgcaaaaaatgggtgccagctacaccacctacgcggcgggggcggtgctgatcgccgtaccggtggcgatcctctacctggcgctacaaaaatacttcgtctccggcctgacctcgggcagtactaaaggataagcacatgaaaagattcacacccgcatggcttgcggtttgtctggcatgcagtttctccacttcttctctggccgcggacgcgcttgcaacccgcgcgtttcagggcatgccggcggactttatcaaaggcgcggatatctccacgctgctggacgccgaaaagcacggggcgacgttctacgatcagaataatcagcgcaaggatccgatcgccattctgaaagagaacggcgtcaactatgtccgcctccgtctgtgggtggatccgcaatcggcgagcggcgaggactatggcggtgggaacaatgatctggccaccaccctggcgctggcgaaacgggcgaaagcccaggggatgaagctgctgcttgattttcactacagcgatttctggaccgatcccggcaagcagttcaagccgaaagcctgggaaaagctggattacccgcagctgaaaacggcgattcatgactatacccgcgataccatcgcccgctttaagcaggcgggcgtgctgccggatatggtgcagatcggcaacgaaatcaacggcggcatcctgtggccggaagggaaaagctgggggcagggcggcggagagttcgaccggctggctggcctgctgaacgcggctatcgctggcctgaaggagaacctgcgccagggcgagcaggtgaaaatcatgctgcatctggccgaagggaccaagaacgataccttccgctggtggtttgatgagatcgacaagcgccatgtaccgtatgacgtgattggtctgtcgatgtacacctactggaatggcccgatcagcgccctgaaggccaatatggatgacatcagcaaacgctataacaaagacgtcatcgtcgtcgaggcggcctatgcctataccctggccaactgtgataacgcggaaaatagtttccaggcaaaagaggaaaaggatgggggatatcccgccagcgtacaggggcaatataactatattcacgatttaatgcaggcggtggttgatgtgccagagcagcgtggcaaaggtattttctattgggagcctacatggattgccgtgccgggaaatacctgggccaccccggcggggatgaaatatatccacgacgagtggaaagagggtaatgcacgtgaaaatcaggcgctatttgattgccagggaaaagtattgccgtcggtaaaagtttttaattaatttttttgtcgtctttttcaggaagtttattatgaataaatttgcacctttacatccgaaggttagtacgctgctgcatggcgcggattataatccggagcaatgggagaatgaccccgatattattgataaagacattgccatgatgcagcaggcaaaatgcaatgtgatgtcggtgggaatatttagctgggcgaaactggagccacgcgaaggggtatttaatttcgcctggctggatattatcctcgataaactgtatgccgccggcattcatgtctttctggccacgccgagcggcgcgcgcccggcgtggatgtcgcagcgctatccgcaggttctgcgggtggggcgcgatcgggtgccggccctgcacggcggccgtcacaaccactgtatgtcgtcaccggtctatcgcgagaaaatcctgcaaatcaataccctgctggcagaacgttattcctcacacccggcggtgctgggctggcatatttccaacgaatatggcggtgaatgccattgcgatctctgccagaaccgttttcgcgactggctgaaggcgcgttaccagaccctggagaacctcaaccaggcctggtggagcaccttctggagtcatacctatactgactggtcgcagattgaatcgcctgcgccgcagggcgagatgtcgatccacggtctcaatcttgactggcatcgctttaacaccgctcaggtgaccgatttctgccgccatgaaattgctccgctgaaggcggcgaatgcctccctgccggtgactaccaactttatggagtatttctacgattacgactactggcagctggcggaggcgctggatttcatctcctgggacagctatccgatgtggcaccgcgataaagacgaaaccgcgctggcctgttacaccgcgatgtatcacgacatgatgcgcagcctgaagggcggcaaaccgtttgtgctgatggagtccaccccgggcgccaccaactggcagccgaccagcaaactgaagaagccgggaatgcatattctttcctcgctgcaggcggtggcgcatggcgccgactcggtgcagtatttccagtggcggaaaagccgcggttcggttgagaaatttcacggcgcagtggtcgaccacgtcggacatattgatacccgcattggccgcgaagtctgccagctcggcgagatcctcagcaagctgccggaggtgagaggctgtcgcaccgaggcgaaagtagcgattatcttcgaccagcagaaccgctgggcgctggatgacgcccaggggccgcgtaatcttgggatggaatatgagaagacggtcaacgagcactaccgcccgttctgggagcagggcatcgccgtcgatgtgattgacgccgatgtcgatttaacgccgtatcagttagtgattgccccgatgttatatatggtgcgcgacggctttgccggtcgggcggaggcgtttgtcgccaacggcggccacctggtgaccacctactggaccggtatcgtcaatgagtccgatctctgctatctcggcggcttcccgggcccgctgcgcaatctgctggggatctgggcggaagagatcgactgcctgaatgacggcgagtttaatctggtgcaggggcttgccgggaatcagtgcggtctgcagggcccttatcaggtgcgccatctctgcgaactgatccatatcgagagcgcccaggcgctggccacctaccgggatgatttttatgccggacggccggctgtgacggtgaacgcgttcgggaaaggcaaagcctggcatgtggcctcccgcaacgatttagccttccagcgcgatttctttaccgccctgagcaaggagctggccctgccgcgggcgatagcgacggagttaccacccggcgtggtggcgactgcgcgcaccgacggtgacaacgcatttatcttcctgcagaactacagcgcgcaaaaccataccctgaccctgccgcaagggtatcgggattgcctgaccgacgcggcggtatcggctccactgaccctgtcggcatgggattgccgtattctccgtcgtcacgcgtaatttcttcttctccacgcctgctctgacgagcaggcttttttttatcttaaacctggagtttattatggtgagtttaaaatccttcctgcactatttctccccagcgcgtccggcacagccattaagcgaggcggaaaaacagcaaatcgaggcgctgattcaggcctttggtggcgaagcgaatattacgcaagtggacgcctgtattacccgtctgcgggttagcgttcgccatcttgcggccgtggactccgaagcattacagcagcagggcgcgctaggggttattattcttggtcagcaggtgcatgctattttcggtaaacagtccgatgcgctgcgtcagcttctggatgaacattttgccgcccggaaataaataaaacgggataacctgaaagcaggttatcccgaaaataagacaaagacagcagtggcaataaagtttaccggaagataattaacagtcttacagcaggagataaaaataacgtatgagccttagccgtgcgcaattaccaccaggcctcaacctgcacgccgaaattccaggtattattcgccgtctggtcttcaaacggtttaccatcttcggaatcattcaaatatgaagcaaaaatgcgtaattccggacgtgacataaagtctggcccgtccgccaggcccaacgcaatggtgtatttctcaccggcctgtttgtagctggtgccattgttgtagctgtctttctgatagaaaccgccgacttcgccaatcaggcgcacgtagtcggtgaactggtactgcccgcgggcgaccagcgacagcatccgcgttttgtcggtatagtcggtaatgtcatccgccgagccccaggtcagaacgtggttgatagaaaacttctctgtaatcgggatcaggccggtgttaatcacgcgataaccggtggcgtcgttcacgtagttccacatatcgtaccagccgccgccctgggagaccatgttctgcgccaggcctttgttggcgtactgcagcacggttttgttatagccgcccagcatatcctgactgatttcaccggtcagcatgacgccgttgtcagcatcgtacagtccgccgtagctatcctgttttttggtggtgtttggcatcgcgtagtcgataccgaattcggtccacgagcccgtccatggcttccagcccgcgtagcgtaaatcgatatagttgatattgacgttgctgtcgccatcgacgcgatagtcaacatcgttggcatcgccgcggatccaggccagcgagacggcgcccgggccgagggtgtagttttccaccccggctccggagccggaaatgttccagtatttggtatcgatgatatgcagatcatggcgctggtagtaacgtttaccgccccagatcaccgcattcggatcgccagggatcagcccctttatctgcaggttcaactgacgtaagccgaactgtgcatcatcgttcagcgtggtttcattatcgttagagccgtcggagaccatgctgaccatactgtcgagatagaagctgacgtcatctttcttatagacctcagagcccagctccagctcgccgtaggtatccgactcgttccccaaacggcctagcttatttttttgccattccgcttcgctaccgtcgccggagaccccaaccccggcgcgcatatagccatggaaatcgatcgttgggatcgcggcggtggccgcaaacgcggaaggagcgattagcgcagcggctaacgcgactgaaagggcgcgcagtgtagtgttcatctctatcctcttattgttttgtattacgttcacataactggtgtcataaaatgcctaaatgtaacttcaggcaaatgagatatgattattgtgtgactaactgcaaataatcacggtggtttttgttgcgatgggtgagatgattcacaattcgttgtattgtgaacgtaatacttttatcgctattgttttgcagtgagaggtggcggtgagcgttttttcaaatggcccctgttacaatcatgggataacaacataaggaaccggaccatgaagtctaaaagcgctactctggaagacgtcgcacgccatgcgggcgtctcttaccagaccgtgtccagggtactcaacaaatcagctaatgtatccgaagcgacgcgtcgcaaggtggagaaatcgatagaggccttacgctatgtgccaaaccggctggcgcagcagctggtggggaaggagagccagacggtcgggctggtgactatttctctggcctggcatgcgccttcccaggtggcggcggcggtaaaacgctatgccaacctggaaggttaccaggttctgatttcgatgatcgatgagagcgtcaaccaaagcatccaggattccatcaatgagctgaaatctcagcgggtggataaagtcattatcaacgtgccgctggagaccgaacaggcgcagaaaatcgctgctgacaacgatgatatcgtctgcctgtttctcgacgttgatccctacagttccgtgtttaacgtttcgtttaacccggcggacggcacccgggccagcgtcaaatatctctatgagatggggcatcgggagatcgccctgctggcggggccggacagctcagtctcggccaaactccggttaaaaagctggctggagaccctggatggttacggtctgaagccggtgaccgtcctgcacggcaactgggatgcgcagagcggctacgccggcgcgctgcagatgctgcgcgaaacgcctaatttcagcgctgtgctggtgggtaatgatcagatggcgctgggggtgctcagcgccttccatcagcatcaggtggcggtgccgggtgagaagtcggttattggctatgacgatacctacgaaagctcctttttctatccggcgctgagtaccgtgtcgctcgacctcgacctgcaggggaaagaggcggtgcggcggatcctcgccagcaccagcggggcgcctcatacctcatccattctgccggcgcgcctggtgatacgccattccagcggcgcccgaatcgagcagggaaaagatctgcaggccattgcagaacagctccgcgccatcgcccaccgtctggcaccctgacgccaaaggcggggaaactcgccttatcaccttactcttaaattgagcagggttgatctttgtcacagcacggcgtacccttaatgttatgttataacgtaatgaagaggtcagcatgaaagcccatatccatcctccctatcgtacggtggtgtttcacgacaccagcgcgaatgagtattttaaagtcggctcaactatccgcaccgatcgcgtgattgaactcgatggcgaaacttttccgtatgtgacgatcgacgtctcctcgaaatcgcatccgtactacacgggcaaacaaaaaaccttcgccaatgaaggcagtgcagcccgattccgccagcgcttcggcggctttattgatgcgaaaaggaaagcatgatgcaggtcgtcaactcattacgtagcgctaaacagcgccacccggattgccagctggttaaacgcaaagggcggctgtacgttatctgtaagagcaacccccgcttcaaagcggtgcaggggcgcaaaaaacgccgttaacggaaactctccagcgagcggcgctgttggccgtcggcggtaaaattgtcggcggccagccattggcgcatggcgttatccagctccggccattcgccgtctatcaccgaaaaccagtccgtgtcccggttgtgtcctttactcaccagcgcctggcgaaaacgtccttcgtactgaaaccccagccgccttgccgcccgtgctgatgggatattaagactgttgcatttccattcatagcgacggtagccgagcgtatcaaagacatactgcatcaacagccagtgcgcttcggtggccatggccgttcggctcagtaacggtgaaaaatgcacatgccccacctctaccacaccgtgagcgatatcgatacgcattaacgccagcgagccgaccgctttccctcgctgctggtcaacgacggcaaaatgaatcgggtctgccagcgtggcgacctgctccacccaggcactgaattctgcaaggttgctctcaggttcacgcagcagccacgtccagctgcgggcgtctggcgccagctggtgagcggcgaacagatcgctggcatgagcaagagtcagcggttcgagtcgacaacggctgccctgtaatacctgtcgtgtcggccaggggcgcggctgccagtcaggcagcgcgacgccgagcgcctggccaaactgattatattcgcacattgcggtttccttattggggatttacaggcagcgtacgcgctcgctggttccataaaaagtgccattagagtatgtttttatggggccacgaggaggcaatatgaatataccggacgaggggttttttacgctgttgacgcaggggatgcggaaccgcacggtcgaaaccttacagcgcgccctttaccacaccttacgtgacgctatcctgcagggaaccctgacggcccgctgccgtttacccggatcgcgggtgatggccgaacggctacacctgtcgcggaatacggtcaatgcggcactggaacagctggcgctggaggggtacctgacacggagccgtcagggaacgcaggtggcaccactcgcctcctgccgccaggaggcgggtcagatgccgcccgtcgtgctgcctgagcggctgcaaaggctgccagccgcgatgcgccgcgactcaccgacgctggcatttacgccaggcatgccggcggtaaactatttcccgctgccgctgtggcggcgactgatggataacgtgctacgcgaagatggtagcgcgctgctgggttatggcgaagccgcgggcgatcctttgctgcgagaggctatcgctcgtcatctggcgctctcccggggcatccggtgcgatatccggcagatcgtcatcaccgaaggcgcgctggaaggcgtcaacttatgcgcctcgctactgaccaacccgggcgacagcgtgtggctggaagaaccggggtacctgggggcgaggagtggctttcagcgggcgggactgcgggtcagaggaatggctgtcgacgatgaagggatgtgtattgccaacggcgtcgcggagccgccccggctcattttcacctctccttcacaccagtatccctgtgggagcatcatgagcgccgggcgccgtctggcgctcgtggaatatgcccgccggcacggggcgtggattgtggaggatgactacgacagcgagtttcgccatagcggagaaccgatcccggcgatgctgggaatggtgcctgatgccccggtggtctatctcggcaccttcagcaaaacgctgtttccggcgttgcgtatcggttttatggttatgccgcccgcgctggcggatgctgctcaggacgccattggcgcgctgctgcgcgggggacaccgtgctgaacagcgggcgctggccagctttatcgagaagggacactatgcgcgccatctggcagcgatgcgccgcctgtaccgtaaacgtcagcaacagctgcgcgaggcgctggcgcaagagataaccgtgccgtgcgacgttctcggcgggggaggggggatgcacctgacggtggcgatggagggcgttaatgaccggacgcttgcgcagcaggcgcgccagtttcagctggcgcccgccgcgttaagtcatttctatctcgacccgcagcgagcgcggagcggactggtgcttgggtatggcaatacctctgcttctcgctatctcccggcgctgcggaccctaaatcgccttattgcgcagcaccggcgcgcgtgagggtaaagacgtcgtagaaggagagctcgcctttggtggcgaccatctttttgagctgcgccttctgctcgctatcgacgtctggcgactgcaggatacggtcgatcagctgccgggggacaaagcgggtgttgtaccattccccgttgtagcacacgcgaaagtcgaggacatcgatatcctcgtagcgatagcgtggatagacgtcaaagaagaaaaaggcgttgaacagaatgaacagcaccaccagcaaccagaccgagtctaccagcgtttcagagcgcagcatgaccaccagcgtcgccagaaacgcggcatacatggcaacaaacagtcccggatgattgcggataaaactgatgctaaaacgcgggcgattatcgcgtttttcctggacgttgagttcgtcaatggtgtgaatcagcaggcgttgtatttctgtcatcttggtcctcgaattctgcaatgagcctgccgcgcccggcggaccaggcgcggcaggctcagcctgaaggctattttatgttgcaatattctgcggagaaagtaacagatcagttacagaaaagcataacagttacggatttgtcggcggaaggcgcttaatgatctgcgccgggttaccgccgacgacggtacaggcaggtacgtctttggtgactaccgcgccggacgcaatgaccgcattatcgccaatggtcacgccgggattgatcactgcccgacccccaatccacacattgtggccaatagttaccggcttgccgtattcctggccgctattacgcgcatcggcgtccagcggatgagtggcggtataaatatggacgcctggcgccagcatacagttatcgccaatatggatagggcagacgtcgagcatcacgcagtcaaaattggcgtaaaaaccggcgccgagaaaaatattataaccatagtcgcagcgaaagcttggctcgatatacgcatcgccggcgcgagcgaacagctcggccagaatatgctgacgttgttcctggtcatccggggcggaatgattataacggtgcaacaactgtctggcgcgcaggcgatcggcgcgaagcgttgggtcgccagataaatagagctcaccggcgatcattttgcgtttttcttcactcatgggtcttccttatacctgactgttgatggccgtagcagtataaaaaagaaaccggttacagggttgctgttggctgaatgatgtgatgtctatcacaaagataccctatggcggctgacccgtaccgtccggccagcagaccacgtagtacgcgtaaattagcggataaatttccagacagaagtcgggattttatcgtatagcttattcatggtcagttccgccagacgatggtcggcagctgagtaaaataccgccagctcattatcagacagttcatatttatttttttcaatgacgcgctccagcgtgtcaattgtctggcaacgacgtaagcgcatcaaatagtctgttttagttaatggcttatcagacataattccaccttttgattgtaataattctaacacgatagactggccgggttttcccggctggcgttgacaaagcaacgaaatagtcggttaccggattttttccacttttgcaaatccgtagagttaatgccgtagttactgaacaacgtaaaagtgtcgtccagatattcgtcaacctgagcgatcagcttattatcctctgcatacttaattttataattaagagcgaatgtggcaatgtgctcgatcaattcatttaactggagattgacagccgacgtcgggtcgttgacccagccatggttgctctcttccaggtttgcaaggcagtcatgatacagcgtttcgcagagaaagcgtagctgtgcaatatcatgtctttttggcgagtattcgtccataacgcatccccttttgagtggtttaaacgacgactagcaaacaccgttgtgggatgaacacgactaactgacctgacactaactgagtaatcctgctgatttaactataatccactctccaacagatttcatcgtgctattacgaaaaattacaattatcagcgagaaattatcttaagaatagacgaattaatttcgcaggcgctggcccacagccggagaaatagagaaatcttatgaatcattggtttaaggcaggcagctgtcgcgttcagaaaccgccgacccgtggataatgatagtaagattattcctggtaaatgagtgtttgccgatcccgagttgttgaacaagctgctaaaaatagcctgcgccatatcaatatatattaaatgcagaacgaaaaataaacaatggcaatatgtgccttgccagccagtgataaaaaagggccgcggtagcggccctttgttcaggagtgaagattaatgatgctcaacctgatggctgtgctctatatcttccgattttttgctaaagcggcgacgaaccaccacaaagaacaccggcacgaagaagatcgccaggatcgtcgcggtcaccatcccgcccattacgcctgtaccgacggcgttctgcgcaccggagccggcgccggagctgataactagcggcattaccccgaggatgaacgccagagatgtcatcaggattggacgtagacgcatacgtactgcttcaagcgtcgcctcaatcagccctttgccctctttctccatcaggtctttggcgaattcaacgatcaatattgcgttcttcgccgacaggccgatggtggtcagcagacccacctggaagtaaacgtcgttggttagcccgcggaaggtggcggctaacagcgcaccaaccacacccaaggggacgaccagcataaccgagaacggaatcgaccagctctcatacagcgccgccagacacaggaagacgacaatcagcgagatggcatacagggcaggggcctggttgccggacagtcgctcctgataagacatcccggtccagtcgtagccgataccggaaggcagtttacccgccagctcttccatcagcgccatcgcctcaccggtactcttgcctggcgcggcctgaccgaggatttccagtgacggcagaccgttgtagcgttccagacgcggcgaaccgtattcccaacgcgaggtcgagaaagcagagaacggcaccatctgaccatcgctgccgcgaacataccacttgccgatatcttccggcagcatacggtatttcgcttcggacatgatgtacactttcttcacgcggccgcggtcgataaagtcgttgacatagcttccgccccaggctgcgcccagcgtggtgttaatgtcgctgatggagacgcccagcgcctgagctttctcctgatcgatatcgattttaaactgcggtgtatcttccagaccgttagggagcacgccggtcagcacgtcaggatgctgcgccaccatgccaaacagttggttacgcgcctgggtcagtttttcgtggcccagaccgccctggtcaatcagctcgaagtcaaagccggtcgcggtacccagttcaacgatagccggcaggttaaaggcgaagaccatcgcatctttaatctgcgagaagtagcccattgctctcgcggtgatcgcttcaactttgttttcctcacccggacgctggctccagtctttcagcgaaacgaacgcgataccggtgttctggccgcggccggcgaaaccgaagccgttaaccgcaaacacggattccacgttgtccttctctttggtgagatagtaattcgtcatctcatccagcactttctgcgtacgctcctgggtggcgccggcaggcagctgcgccatactcaggaatacaccctggtcctcgtccggcaggaacgagctcggcagacggacgaacagccatgccatacccaccacgatgatcagatacagcaccagataacgaccggtgctgcgcagaatgttgcctacgctgtcggtgtaatggtgcgtgctcttatcaaacatgcggttaaaccagccgaagaagccggtggtcgcgccatggctgcctttctgaatgggtttcagcatcgtggcgcacagcgccggcgtcaggattaacgccaccagtaccgacagcgccatcgcggaaacgatagtgatggagaactggcgatagatggccccggttgagccgccgaagaacgccatcgggataaataccgccgacagcaccatagcgataccaaccagcgcgccctgaatctgtcccatcgatttacgcgtcgcttctttcggcggcagaccctcttccgccatcacgcgctcgacgttctctaccaccacgatggcgtcatccaccaacaggccgatggcgagcaccatcccgaacatcgtcagggtgtttatcgagaagccaaacgccgccagcaccgcgaaggtgcctaacaggaccaccggtaccgcgatggtggggatcagggtggcgcggaagttctgcaggaacagatacatgaccaggaacaccaggatgatcgcttccaccagcgttttaaccacttcgtgaatagaaattttcacgaacggggtggtgtcatacgggtaaacgatcttcatccccgacgggaaaaacggctccatcttcgccagttcagcgcgaatagcgttggcggtatccagcgcgttcgcgccggtagccagtttaatacccagaccggatgccggctggccgttaaacttcgccactacgtcatagctttcgccgcccagctcaattttggcgacatcacgcagacgaacctgggaaccgtcctggttcaccttcagcaggatgttgccaaactcttccgtattggtcagacgcgtctgcgcgatgatcgaggcgttaagctgctggcctttcaccggcggcgtaccgcctaactggcccgcggccacctgggcgttctgcgctttcagggcgctgatcacatccaccggcgtaagctggaagttgttcagtttgtttggatccatccagatacgcatcgcatactgggaaccgaatagctgaacgtcgccgacgccgctggtacggctaatcggatccttcatgttggccgccacgtagtccgaaatatcgtcctggttcatggtgccgttggtgttaatgacgccgacaaccatcaggaagctgctggacgctttctcaacgctaatcccttgctgctgtacttcttgcggcagcagaggcgtcgccagcgccagcttgttctgaacctgaacctgggcgatatccggatcggtaccggattcgaaggtcagcgtaatggttgccgtaccggtggagtcgccatttgaggacatgtacatcaggtgatcgataccgttcatattctgttcgataacctgagttacggtgttctgcaccgtttcggcgtcagcaccggggtacatggcggtaatggaaattgctggcggcgcaatcgtcggatattgcgccaccggcaatttgaggatcgataatcccccagccagcatgatgataatggcgatcacccatgcaaatatggggcgatcgataaagaaattaggcatgtcttaacggctcctgtttaagttaagacttggtttgttctgatggcgcgttgcctgcggcttgctgtttatcatcagaagctacttcctgcgcttttacctgcacacctggtttgattttttgcaggccggtgacgataacgcgatcgccggatttcagaccgtcagtgaccagccatttatcgccgatcgcctgagaagcagtgacctggcggacttcgactttatcgccttcccccactaccatgacgctggcgtcgccgcgcggcgtacgggtaacaccctgttgcggtaccagcagggcgtcagggttaatcccttcttccagacgggcacggacgaacatccccggtagcagggtgtgatccgggttcgggaaaatagcgcgtagcgtgattgagccggtggtctgatcgacggtgacatccgagaattccagcgtgccggactgcggatacttaagaccgtcattagtcactagctccactttcgctttgccgttttcctgtttcaggcggccgtcggctagctcctgcttcaggcgcaggaaatcattgctcgactgggtgacgtcaacatagatcggatccagctgctgaacggttgccagggcggtcgtttgaccattctgtaccagcgccccttcggtcacggtggatttaccaatccggccgctgatcggcgaggtgactttggtgtaggccagattgatgcgcgcggtttcaacggccgctttcgccgcgaccacggccgcattgctctgctgcgccgtcgcaacggcggtatcgtagtcttgttgactaatatatttggtgcccaacagtttctgataacgcttgaccgtcagttgatccatgtttgccgccgcctgggcttttgccaggtcgcctttggcgctgtcatagctggcctgataggtggctggatcgatctgatacagggagacgccggcctggatatcgctaccttccacgaagttacgttttaaaataatgccactgacctgaggacggacttccgcaatgcgataggcgctggtgcggcctggcagttcggtggttatttgtagaggtgcggatttgagcgtcacaataccgacttccggcatgtgctgggctccctgttgagccggtttatcgtcacatcctgttagcgctaagctgcctgagagcatcagaacgaccgccagaggcgttaaccctctgtttttgttcatatgtaaacctcgagtgtccaatttcaaaatgttcagtggctcaaacaaccacaaacccactacagtctttctattatggtcatgctatggtacatacattcacaaatgtatgtaaacgtaacctctgtaaagtcattaacctatggcacgaaaaaccaaacaacaggcacgtgaaacccggcaactgattctggatgttgctctgcgtctgttttcgcagcaaggcgtatcatctacctcgttggcaacaattgcaaaagctgcgggtgtaacgaggggggctatctactggcatttcaagaataaatcagatttattcaacgaaatttgggagctgtcagacgccagtattagcgatctcgaaattgagtatcgggcaaaattccccaacgatccactctcagttatcagggagattctagggaaggtgcgaacaagttcctgatatgagatcatcatattcatccggagcgcatcccagagggacatcatgagccatcaactcaccttcgccgatagtgaattcagcactaagcgccgtcagacccgaaaagagattttcctctcccgcatggagcagattctgccatggcagaatatgaccgctgtcatcgagccgttttatcccaaggcgggcaatggccgacggccctatccgctggagaccatgctgcgtattcactgcatgcagcattggtacaacctgagcgacggtgccatggaagatgccctgtacgaaatcgcctccatgcgcctgtttgcccgattatccctggatagcgccctgccggatcgcaccaccatcatgaatttccgccacctgctcgagcagcatcaactggcccgtcaattgttcaagaccatcaatcgctggctggccgaagcaggcgtcatgatgacccaaggcactttggtggatgccaccatcattgaggcacccagctctaccaagaacaaagagcagcaacgcgatccggagatgcatcagaccaagaaaggcaatcagtggcactttggcatgaaggcccacattggtgtcgatgccaagagtggcctgacccacagcctggtcaccaccgcggccaacgagcatgacctcaatcagctgggtaatctgctgcatggagaggagcaatttgtctcagccgatgccggctaccaaggagcgccacagcgcgaggagctggccgaggtggatgtggactggctgatcgccgagcgtcccggcaaggtaaaaaccttgaagcagcatccgcgcaagaacaaaacggccatcaacatcgaatacatgaaagccagcatccgtgccagggtggagcacccgtttcgcatcatcaagcggcagttcggcttcgtgaaagccagatacaaggggctgctgaaaaacgataaccaactggcgatgttattcaccctggccaacctgtttcgggtggaccaaatgatacgtcagtgggagagatctcagtaaaaaccggaaataacgccagaaatggtggaaaaaatagcctaaataggctgattcgatgtgtttgcgggaaaaaaatcggcccagatccgcgaaattttaatcaacgagtcagcttgggaagaaatgacctgcttattcgcactttccctagtctatgttcttgaagcgacagtgacagaagaacgtcgacgattaatgatggagattatctatcataagtgtgagttcgtcggtgaaatgaccgtggtgcagcaggcccagcggcagctctccctggcgagttatgagcgtatcgagcagaccttgaaagaatgcatcgcggcgaagctgctgcccgccaatttactcacccggcgggcggccgtgttaatgcgcagctacctttccgggctgatggaaaactggctgtttgcccccgattcgttcgacctgcatgcggaagcgcgggactacgtcgctattctgctggagatgtatcaattctgcccgacgctacgcggcccggagagcttgtcagcttaaaggtagcgcgcggatgggcgtgaatttttagcgccgtccgccgctattcgccagcgctgagaagtgctattctgcgcgcttgcgacgacccccggtattctccggcatttgcattcattcatattaactatgctgcacacgatctccaggcaacgcgccacgttcatctttattatcacgctgctctgttttattggccttttcagcccagtccagggccgcgccgcggatctccccgatcgggcagaggtgcagagccagctcaatacgttaaacaagcaaaaagaactgactccgcaggacaaactggtccagcaggatctgactcagacgctggaaacgctggataaaatcgagcgtatcaaaagcgagacggcacagctgcgacagcaggtcgagcaggcgccggcgaagctgcgccaggcggtggagagcctcaataacctgagcgatgtcccgaacgacgacgcgacgcgcaaaacgctaagtacgctctccctgcgtcagctggagtcgcgcgtcacccagacgctggacgatctgcagaatgcgcaaaatgatctggcgacctataacagccaactggtttccctgcaaacgcagccggaacgcgtgcaaaatgcgatgttcaacgcctcccagcagctgcagcagatccgcaatcgtctgaatggcacctcggtgggcgacgagaccctacgcccgacccagcaggtgctgttgcaggctcaacaggcattgctcaacgcgcagatcgagcaacagcgcaagagcctcgaaggcaacactatcctgcaggataccctacagaagcagcgtgactacgtcaccgcctggagcaaccggctggagcatcagctacagctgctgcaggaggccgtgaacagcaaacggctgaccctgaccgagaaaaccgcccaggaggcagttacccccgacgaaacggcgcgtattcaggccaacccgctggtcaagcaggagctggatattaaccatcagctcagcgagaagctgatccaggcaacagagaacggtaaccagctggtgcagcgcaatatccaggtcaagaactggctcgaccgcgcgctgcagtctgaacgggatattaaagagcaaatttcagttctgcgggggagcctgctgctgtcgcgtattctttaccaacagcaacagacattaccgtcggcggatgagctgcaggatatgaccaaccgcatcgccgacctgcggcttgaacagtttgaggtgaaccagcagcgcgacgcgctgttccagagcgatgcctttgtcgccaaactggaggaggggcacagcagcgaagtgaacgatgaagtccacgccgcgctactggaagtgatcgacatgcgtcgcgaactgcttgatcagttcaacaaacagttgggcaaccagctgatgatggccatcaacctgcagatcaaccagcagcagctgatgagcgtctcgagcagtctgaaggaaattctgacccagcaaattttctgggtgaacagcaataaaccgatggactgggagtggattaaggccttcccggaggcgctgaaaggtcagtttaaggcgatgaaaatcaccgtgaactgggaaaaagcgtggcctgcggtgtttgtcgctttcctggccggtttaccgctgctgttgattgccggcctcatccgctggcgtctgcagtggctcaaggattatcaggcaaagcttgcttcccaggtgggacagctgcgcaacgatacccaactgcatacgccgaaggcgatcctgatcgatctgatccgcgccttaccggtggtgctgttgattctggctatcggtctgatcttactcaccatgcagttaaatattagcggactgctgtgggcgtacagtaaaaagctggctatgttctggctggtgtttggcctgtgctggaaagtgctggaaaagaacggcgtcgcggtcaaccactttaatatgccggcgcagttgaccagccactggcggcggcagattgttcgcgtcagcctggcgctgctgccgctgaatttctggtcggtgatttccgaactgtcgccgctgaacctgatggacgacgcgctggggcagttggtgattttcttcaacttactgctgatcgcggtgctggtttggccgatgtgccgggaaagctggcgcgataaagagtcgcacagcctgcgcctgctgacgatcacggtgttgtctatcgttccggtggccctgatggtgctgacggcaaccggctacttctacacgacgctgcgtctggcgggacgctggatcgagaccgtgtatctggtgatgatctggaacctgctgtaccagaccgtgctgcgcggcctgagcgtggcggcgcggcgtatcgcctggcgccgcgcgctggcgcgccgtcaacatctggtgaaggaaggggcggaaggcgccgagccgcaggaagagccaactatcgctctcgagcaggtcaaccagcagacgctgcgcatcaccatgttggtgatggtcgcgctgttcgcggtgatgttctgggcgatttggtctgatttgatcaccgttttcgcctacctcgacagcattaccctctggcactacaacggcaccgaggcgggggccagcgtggtgcgcagcgtgacgatgggcagtttattgttcgccattgtggcgtcaatggtcgcctgggcgctgatccgcaacctgccgggtttgctggaggtgctggtgctgtcgcggctcaacatgcgtcaggggacctcctacgccatcaccaccattctcaactatgcgattatcgctatcggggcgatgacggtattcggggcgctgggtgtctcctgggataaactgcaatggctggcggccgcgctgtcggttggtttaggttttggtctgcaggagatcttcggtaactttgtctccggcctaatcattctgttcgaacgtccggtgcgcattggggatacggtcactatcggaaccttctcggggacggtaagcaaaatccgtattcgcgccaccaccatcaccgatttcgatcgcaaagaggtgattatcccgaacaaggcgttcgttaccgagcgcttgatcaactggtcgctctccgacaccgtgacccgggtggtgatccgcctcggcgtcgcctatggctcagacctggataaggtgaaagaggtgctgctgaaggccgcgcacgatcatccgaaagtgatgcaggagccggcgccagcggttttcttcaccaccttcggggccagtaccctggatcatgaactgcgtctgtatgttcgagaactgcgcgatcgcagctacacggtagatgagctcaaccgcgccatcgaccgcctgtgccgggagaatgacatcaacattgcctttaaccagctggaagttcatctgcgcaatgaaaaaggcgatgaagtcaccgaagtgaaacgggacgggaaaggcgacgatctggcgcccaccaccgcgtcctgagcgaagaggggcggcgcaaagccgcccctgctgtatcagggcgccagcgcggcgagttcttcatcgctcagcccggtgagctcctgcacggtttgacgttcgaggccgcgcgccagcattctggcggcgatgctgcgggtagcttcctgctcaccctcttgctgtccctgtttacggcctttctcttccagccattcggcaatggtcatcatcagctccttatgcctgggcgactgcgccgccagcgtgcggatcagcgcccccggatgttccgtagttcccgcctgcaacatatagcgcagcagcgtattcagctgcgcttctgtcagatagccttgcgtcatcagcgtaatcagcggcacctgcagctcggccagatcgcgatggcggatatgcttttgcagcagctccagcatggccatccgccgatgacgggcgatctgattatctggcattacggtgaggtccaccagcggaaaatcattgctatagagcgccttcgccagcgccggatcggcgaatagctgttgccagttgcgggcccagggccaggggctcactttgccgtgataaaacagaatcggcaccaccagcggcagagtgtcgtggccggcgtccagatgacgctgcatggcggccagcgcatagcgcagcaggcgaaacgtcatcagcttgtccggggtactctggtgctcaatcagcgcgtacacatagcccggtccatgacgcgtgcgcagtgagtaaaggatatcggaatagctggcgcgcaggtcctcttcaacaaagctaccggagaccagctgcagcgaatccagttcgcagatcgccagaaacggcgcggggaggtacaactgcaaaaaatccttcgcgaccgcctgatgcatgagcatctggcgaaacaccgcgtcgtgtggggtttgactgactttttccatcaatattgtctccaggggcgtcatgcgcagaggaccagactgccagcacactgccggagacaacatcctacttctctgggttttgcgacccgctttccgcgttttttaacttgtttgcataatcccgccggacaatttccagcgcgctcagcacggtttgcgccgggatctgatgcgattccagcaacatgattaaatcgacggccagtttgacctcatcggatgcattttccagcgacatcgggctctcctgttagcgcgtcagccgcgccagtacgttttcaatcttgtccagcgcctgtcggcagcgcgccaaccggccgctgtaggcttcaacttctttccccagccgctgctgctcgtcaaggctggtcgcctgcgccagctgacgctggcgttggtcgcgcatcgccagcaggcggcgctcatactcctgatgctgcaggcgacggcgctgccagcggctcaacgttggcgacgcgtggtcccaactgcgcaaggaccaggtggcggtttcacggcgcagcgcggcgatttgtgccgccagacgctcggcaatccagaccacttgcggcagctgctggcgctcgacggcctggcggagctggttaaagttgtgttgggcttccgccagataggcctgcatcagcgtgctgcgggtgtggaagagctggcggtcaaagcgcgggctgagggtcgcgtgctccgccagcggcgccaccagcgcggccagctcactcagctggtcgttcagcgtttgtaaaagttgagcagttttcaccaaccccctccattttccgtcagccaactgtgctacagtagcctcatctgtttgataacgattcgcattatgccacctgttattttaaccattatcggctggctggcggtagcgctgggtacgctgggcgtcttcttaccgttgctgccgacgacgccgtttattctgctcgccgcctggtgctttgcccgctcatcgccgcgctttcaccagtggctgctgtatcgctcctggtttggcggctatcttcgccactggcaacagtaccgcgccatgcctcgcggcgctaaaccgcgcgccattgcgatgatcgtggtgacttttgctatttcgctatggctggttaagcttacgtgggtgcgcatcatgctgttggtcattctggcctgtctgctgatctttatgtggcgcattccggtggttgacgcaaagcaacaaaagcactgatgcgcaataatgcctgttgcaattgttgccgacagccagtaaattctggcgttttcgagcgcgggcaagcctggtcaaaggttaaacaaatgtttctttggccccttttgcacgcccgtgggtaataccgtttcaatcaggcatacacttatgaccgcaactgcacagcagcttgaatatctgaagaacagcatccagagtatcgaggattatccaaaacctggcattcttttccgcgatgtcaccagcttactggaagacccgaaggcctacgcgcttagcattgaactgctgaccgagcgctacaaagacgcgggtattaccaaagtggtagggactgaggcgcgtggcttcctgttcggcgccccggtcgcgctggcgctgggcgtgggctttgttccggtacgcaagccgcgtaagttgccgcgtgaaaccatcgccgagacctatgagctggagtatggcaccgatcagctggagatccacgttgacgccattaaaccgggcgataaagtgctggtggttgacgatctgctggcgaccggcggcactatcgacgccacggtcaaactgatccgccgcctcggcggcgaagtgcacgatgccgctttcattatcaatctcttcgatctgggcggcgaacagcgcctggagaagctggggatccactgctacagtctggtgccgttcccgggccactaagcaaatccctccacatagcctcgccgatcgggcggggctgtgatagcatgaccccttcgtgatttcaccttccagcgtttcagagccagcccatgagttatcaggtcttagcccgtaaatggcgcccacaaacctttgctgacgtcgtcggccaggaacatgtgctgaccgcactggcgaacggcttgtcgttagggcgcattcatcacgcttatcttttttccggtacccgcggggtcgggaagacctccatcgcccgtctgctggcgaaagggttaaactgtgaaaccggcatcaccgccaccccctgcggcgtgtgcgataactgccgggaaattgaacaggggcgctttgtcgatctgattgagattgacgccgcctcgcgaaccaaagtcgaagatacccgcgatctgctggacaacgtccagtacgcgccggcccgcggccgctttaaggtctatctcatcgacgaagtccatatgctgtcgcgtcacagcttcaacgcgttgttaaaaacgctggaggagccgccggcgcacgtcaaattcctgctggcgacgacggatccgcagaagctgccggtaacgatcttatcccgctgcctgcagttccacctgaaggcgctggacgttgaacagatccgccatcagctggagcatattcttggcgaagagcagattgcctttgagccccgcgcgctgcagctgttgtcgcgggcggccgatggcagcctgcgcgatgccttaagcctgaccgatcaggcgattgccagtggggaagggcagctgacggccgcatcggtgagcactatgctcggcacccttgatgacgatcaggcgctgtcgctgattgaagcgctggttgctgccgacggcgagcgggtcatggcgagcgtcaatgacgccgccgcacgcggcgtcgagtgggaggcgctgctggtcgagatgcagagcctgctgcaccgcatcgccatggttcagctgtcgccttcggcgctgggcgccgacatggccgcggtcgaagtgcggatgcgcgaactggcgcgaaccgtaccgcccggcgacgttcagctctactaccaaacgctgctgattggccgcaaagagctgccttacgccccggaccggcggatgggcgtcgaaatgacgctgctgcgtgccctggcgtttcatccgcgtaagccgctgccggagccggaggcgcagccggcacaggccgccgcgcccgcgccgcgtcagccggttgcccccgccgcgccgccgccacagtcgccgcagagtttgccgccgaccaccagccaggtgctggcggcccgcagccacctgcagcgcagccagggagcaaccaccccaaaaaagagtgaaccggcagccgcttcccgcgcgcggccggtgaataacgctgcgctggagcgactgagttcgattaccgagcgcgtccaggctcgtccggccgcggccgcgctggagcaggccccggcgaagaaagaggcctatcgctggaaggcgacgacggtggtggaagagagcaaagtcgaagtcgccacgcccaaagcgctgaaaaaggcgctggagcatgagaagacgccggagctggcggccaagctcgccgaagaagcggtcgagcgcgacagctgggcggcggaagtgagccagctggcggtaccgaagctggtcgagcaggtggcgctcaacgcgtggaaagagcaggagggcagccgcgtctgtctgcatctgcgtcccagccagcgccacctcaattccgccagcgcgcagcaaaagctggctgaagcgctgggggtgttgtacggtacgccggttgaattgaccatcgtggaagacgataatcccgcgatgcgtacgccgctggagtggcggcaggctatttatgaagagaagctcgcgcaggcgcgcgaagccattatcgcggataataacattcagaccctgcgtcgtttcttcgacgccgatctggatgaagagagtattcgccccatttgaatgccagtctgactggcattcagtacctttaacgatgactgactgagagagaagcctatgtttggtggaaaaggcggcctgggtaacctgatgaagcaggcccagcagatgcaagagaaaatgcagaagatgcaggaagagatcgctcagctggaagtaaccggcgaatccggcgcgggtctggtgaaagtgaccattaacggcgcgcacaactgccgccgtgtggagatcgacccaagcctgctggaagacgacaaagagatgctcgaagatctggtggctgccgcgttcaacgacgccgcgcgccgtatcgaagagacccagaaagagaagatggcttccgtttctgccggtatgcaactgccgccaggcttcaagatgccgttctgatgcaaaccagcccgctgttaactcagcttatggaagcgctgcgctgtctgccgggcgttggcccgaagtcggcgcagcgcatggcgtttactctgctgcagcgcgatcgcagcggcggtatgcgcctggcgcaggcgctgacgcgcgcgatgtcggaaatcggccactgcgccgattgccgcaccttcaccgagcaggaggtgtgcaatatttgcagcaacccgcgtcgccaggaaaacggtcagatctgcgtggtggagagtccagcggacatctatgccattgagcagaccgggcagtattccggccgctacttcgtgctgatggggcacctgtcgccgctcgacggcatcgggcctgatgacatcgggctcgatcgcctggagcaacggctggaggcggagtcgatcaccgaggtgatcctcgccaccaacccgaccgttgagggcgaggcgacggccaactacatcgcagagctgtgcgcgcagtatggcgtcgacgccagccgaatcgcccacggcgtgccggtgggcggcgagctggagatggtcgacggcaccacgctgtcccactccctggccggtcgccacaagattactttctgaacaaatggaggcggccttcgccgcctccgcttgaaaaatttccccgctgtccccatctcccactcaacggttttttacccatttaaaatggcattgttgaggttgaatcagatgaaaggacaagaaactcgtggttttcagtcagaagtaaagcagcttctgcacctgatgatccattccctctattccaacaaagaaatctttctgcgtgagctgatttccaacgcctctgatgcggccgataagctgcgtttccgcgcgctgtcgcagccggatttgtatgagggagacggcgagctgcgcgtgcgggtttcgtttgataaagacaaccgcaccctgaccatcgccgataacggtatcggtatgaaccgggaagaagttatcgaccatctcggcaccatcgccaaatccggcaccaaagcgttcctcgaatcgatgggttccgaccaggcgaaggatagccagctgatcggtcagttcggcgtcggcttctattcggccttcatcgtggcggacaaagtgaccgtgcgtacccgtgcggcgggcgacaagccggaaaacggcgtgttctgggaatccgccggcgaaggcgaatataccgtagctgatatcaccaaagccgatcgcggcaccgaaatcaccctgcatctgcgcgaaggcgaagatgatttcctcaacgactggcgcgtgcgctctatcatcagcaaatattccgaccatatcgcgctgccggttgagattgaaaaacgggaagagaaagacggcgaaaccgtggtttcgtgggaaaaaatcaacaaggcgcaggccctgtggacccgcagcaaatccgaagttaacgacgacgaatacaaagagttttataagcatatcgctcacgactacagcgacccgctgacctggagccacaaccgcgtggaaggtaagcaggagtacaccagcctgctgtatatcccgtcgcaggcgccgtgggatatgtggaaccgcgatcataaacacggcctgaagctgtatgtgcagcgtgtgttcatcatggacgacgccgagcagtttatgccgaactacctgcgcttcgtgcgcggcctgatcgattccaacgatctgccgctgaacgtctcccgtgaaatcctgcaggacagcagcgtgacccgcaacctgcgcaccgcgctgaccaaacgcgcgctgcagatgctggataagctggcgaaagacgacgctgaaaaataccaaaccttctggaaacagttcggcctggtgctgaaagagggcccggcggaagatccgagcaaccaggaagcgatcgccaaactgctgcgtttcgcaaccacccataccgactcctccgcgcagaccgtgtcgctggaagagtatgtctcgcggatgaaagaagggcaggagaagatctactacatcactgccgacagctatgcggcggcgaagagcagcccgcacctcgaactgctgcgtaagaaagggattgaagttctgctgctctccgatcgcatcgacgagtggatgatgagctacctgaccgagttcgacggcaaagcgttccagtctgtcgctaaagccgacgagtcgctggacaagctggcggatgaagtggacgagtccaccaaagaagctgaaaaagcgctggagccgttcgttgagcgggtgaaaaacctgcttggcgaccgggtgaaagaggtgcgtctgacccatcgtctgaccgacaccccggcgattgtcactaccgatgccgatgagatgagcacccagatggcgaagctgttcgcggcagcgggccaggcggcgccggaagtgaaatacatcttcgaactgaacccggcgcatcagctggtgaaacgcgcagctgatacccaggatgacgcccagttcggcgaatgggtggaactgctgctggatcaggcgctgctggccgagcgcggcacgctggaagatccgaaccagtttatccgccgtatgaaccagctgctggcttcctgacgcgaacctgaacgagtagcccggccgagcgacgcgacgccgggaacgggataaatgccccgtctgagcgatgtgctcaggcggggcatttcacattggattgcataaaatatctcaccattaaccgtttcagccgcaccgccttccttgagccatcgccgttctggtggtatggtttagcgtttttgaaaaattgaatcgacttttgaggggattttcgtaatgcgtattattctgcttggcgctccgggcgcgggtaaaggaactcaggctcagttcatcatggagaaatacggtattccgcaaatctccaccggcgatatgctgcgcgcggcggtaaaatccggctctgagctcggtaagcaagcgaaagacattatggacgctggcaagctggtgaccgatgagctggtcatcgcgctggtgaaagagcgtatcgcccaggaagattgccgtaacggcttcctgctggacggcttcccgcggaccattccgcaggctgacgccatgaaagaggcgggcattaccgttgattacgtgctggaattcgacgtgccggacgaactgatcgtcgaccgcatcgttggccgtcgcgtccacgcggcatccggtcgcgtataccacatcaaattcaatccgccgaaggtggaaggcaaagacgacgtgaccggcgaagagctgaccacccgtaaagacgatcaggaagagaccgtgcgtaagcgtctggtagaataccatcagatgacagcgccgctgatcggctactacaccaaagaagcgcaggcgggcaacaccaaatacgccaaagtcgacggcaccaaagcggtagctgacgtgcgcgccgaactggaaaaaatcctcggctgataaagccctttctcatcctgctgcggcaggatgagaactcctctcatttctaccttttgctatgattggttccgtttagcgccatttcagctacaattggctgcgattcaaatggttaagaggcggtaatgcatcagacgaaaacaggtatcttgctggccaatttaggcactcccgatgcgcccacccccggggcggtgaagcgctatctgcgacaattcctcagcgacaaacgggtggtggatacgtctcgtctgctatggtggccgctgctgcgcggcgtcatactgccgattcgctccccgcgcgtggcgaagctctatcagtccgtgtggatggaagagggatcgccgctgatggtgtatagtcgtcgccagcagcaggcgctggctgccaggctgccggataccccggtggcgctgggcatgagctatggttcaccgtcactggccagcgcggtggatgacttactggcgcagggggtggagcacatcgtggtgctgccgctgtatccgcaatattcctgctcgacggtggccgccgtctgggacgaactggcgcggattctggcgaaaaagcgcgccattccgggtatctcgtttattcgcgactatgccgaacatccggactatatccatgcgctggcggccagcgtgcgcgcttccttcgctgtccatggggaaccggatctgctgctgctctcctatcatgggatcccgcagcgctatgccaaccagggcgatgattatcctcagcgctgtcgcgatacgacgcgggaactggtttccgcgctggggctgccgccggagcgggtgatgatgactttccagtcgcgctttggccgggaaccctggctgaccccgtacaccgatgaaacgctaaagatgctcggcgagaaagggacgaagcatattcaggtgctgtgcccggggtttgccgccgactgtctcgaaacgctggaagaaatcgccgtccagaaccgggaaatattcctcgaagcaggcggcaagcaatatgaatatattccggcgcttaatgcggacgcagcgcatattgagatgatggtcaatctgacggcgccttatcgctgatcgcgcgcagggcggggaatatgctactatttcccgcttgttccctgttatttaagcgccactatgaaatttcccggtaaacgcaaatctaaacactattttcccgttaacgcccgcgatccgctgctgcagcaaattcagccggagaatgaatccagcgtctcctgggtggtcggtatcgaccagacgctggtggatatcgaagcgaaagtggatgaggcgtttatcgtgcgctacggcctgagcgcgggccattcgctggtgattgaagatgacgtcgccgaggcgctgtaccaggagctggtgcgcaacaatctcattacccatcagtttgccggcggcaccatcggcaataccatgcacaactactcggtgctggcggacgatcgctcggtgctgcttggcgtgatgtgcagcaatatcgaaatcggcggctacgcctatcgttacctgtgcaatacctccagccgcaccgatctgaactatctgcagggcgtcgacggcgccattggccgctgctttaccctgatcggtgacagcggcgagcgcaccttcgccatcagcccgggccacatgaacaagctgcgtccggaaagcattccggaagcggtgatcgccggcgcctcggcgctggtgctgacctcttacctggtccgctgcaagccgggcgagccgatgccggacgcgacgatgaaggctattgagtatgccaaaaagcacgatgtgccggtggtgttaaccctcggaaccaaatacgtgattgccgataacccggcgtggtggcaggagttcctgcaggagcatgtctctattctggcaatgaacgaagaggaaggggaagcgctgaccggctttgccgatccgctgtcagcggcgaataaggcgctggactgggtcgacctggtgctgtgcaccgccggcccggcgggcctgtatatggcgggcttcaccgaagaagaggcgaagcgtaaaacccagcatccgctgctgccgggggcgatcccggagtttaaccagtttgaattcagccgcgcgatgcgtcaccaggattgcgttaatccgctgcgcatatattcccatatcgctccctatatgggcggccccgagaagatcatgaacaccaacggcgcaggcgacggcgcgctggcggcgctgctgcatgacatcaccgccaataactaccaccgcaataacgtacccaactccagcaagcacaaatgcaaatggctgacctactcctcgctggcgcaggtgtgtaaatatgccaaccgcgtgagctatcaggtgctgaaccagcactcgccgcgtttaacccgcggcctgccggagcgtgaggacagcctggaagaggcgtactgggatcggtaagcgcgtccctctcccggcggggagagggcagtacatcagccggtgaccacttcgccggccggtggcgtttccagaagccgcagcatggcgcgggcaatttcccgttcgcccatcaccacctgattggctccgcgatcgataatgtagtccacttcgtcatcataatgggcgcgggcgataatctcgatattcggacatttttcccgtgcggaagcgacaatctctccggcctcgtagccgttagggattgtcagcagcagccagcgggcgcaatcgagatgcgccagctccatgatctcttcattggcggcattgccgagcaccgcgctgatcccgcgctcgcgtagctcatccacgcgggtgcgcgaggtttcaaccaccaccagcgggatcccctgggccatcagcttctcgcccagcaggctgccgacgcggccgaagccgaccaacagcgcgtggttgcagatatcgaccggcacctgcttctcgtcttccaggacctcttccagcgtctgctcgtcgagggtttcggttttatcgagatatttttccagcagggtaaacagcaccgggttgagcataattgagatgatcgccccggccagcaccagattttgtccggcctgcggcagcaggttaagcgccattcccaggccggcgagaataaaggcaaactcgccaatctgcgccaggctggcggcgatggtcagcgcggtgcgcggcgagtgaccaaacatccgcacaaggaaaaaggcggctgcggatttaccaaagataataatcgccagcgtcgccagcaccgccagcggctgttggaccagcaccatcgggtcaaacagcatgccgacggagacgaagaacagcaccgcgaaggcgtcgcgcagcggcagggtgtcatgggcggcgcggtggctgagctcggattcgttaagcaccatgccggcaaagaaggcgccgagggcaaaagagacatcaaacagctccacggcgccgaaggcgatgcccagcgccagggccagcaccgacagagtgaacagctcgcgtgagccggtggcggcgctgcgcgacatgatccacggcaccagccggcggccgaccagcatcataatggcgataaaggccaccactttgccaatggtgatcccgaggtcgagggccagggacgcgaagccgacgttgcctttctccgccataccggcaatcgccggcagcaggaccagcgtcaggaccatcaccaggtcttccacaatcagccagccgatggcgatttgcccgcgctggctgtcaatcagttgtcgttcctccagcgcgcgcagcagcactacggtactggcagtggagaggcacaggccaaagacgatgccggtcatcagcgaccagccgagggcggcggagagcgccatacccagcagcgtcgccacggctatctgggcgatagccccggggatggcgatcgattttaccgccatcaggtctttaagtgagaaatgcagcccgacgccgaacatcagcagaatgacgccaagttccgccagttccggagccagtttggtgtcagcaacaaagccaggggtgaaaggtccggccagcacgcccgctaagagatatcccaccagaggagaaatacgtagcttattggcaatcatgccgagaataaaggcgagcacgaggccgccgacaatggtggtgataagcggtgttgcgtggtgcattccgtctcctttccagtggtgtatcggtccattttgctaccctgtccgggtaatagtttatgacaaaaacgttcactttgtttatgaataattcttgagttgtgcaaaaaaatgcaattagccgatgaaaaggcacagaagggaaaatggcggggggaaatcgtggaacaggctgatgacacaagggttaacggcggccagggttgcactttggccgccgaataatcaggctttttgccggttatcaggaaggaatatcgtcaggaatcccagcagcggcaggaaggcgcagattttataaaccagatcgatgctggtatggtccgccagcaggcctaacaccgcggcgccaaggccgcccatgccaaaggcgaagccgaaaaacaggccagaaaccatgccgatgcgtcccggcagcagttcctgcgcatagaccagaatagcggaaaaggccgaggcgaggataaaaccaatgatcaccgttaaaatccccgtccattcaaggctggcgtagggtaaaacaagggtgaaaggcgctacgccgaggatagagccccaaatcacatatttacgcccaattttatcgccaacaggcccgccaattaccgtcccggcagccactgcgaacaggaaggcaaacagatgaagctgagcgttttgcaccgttaagccgaatttatgcatcagataaaaggtgtaatagctgctaatgctcgccatatagaaatatttcgagaaaatcagcatcagcagaatgcctaccgccagaataaccttcttgcgcggcagcggattaacgatggccggtttcggtttgcccttattcattcgatgctgcgcggcataccagcggctgatttgcgacagcacgacaatagccagcagagcggccagcacaaaccaggcgacgttgcctttgccgtacggggcgatgatcaccgccgccagcaatgggccaagcgagctgccgaaattgccgcccacctggaacagcgactgggccaggccgtgacggccgccggaggccatccgcgccacgcgggatgattccggatggaaaaccgaggagccggtacctaccagcgcggcggccagcagcaccatgccgaagctaccggccagcgcgaggagaatcaaaccgcagagggtgaagcacatgcccaccggcagcgaccacggcatcgagcgtttatcggtgatgtagccaatcaccggctggaatagcgatgaggtgagctggaaggtcagggtgatcatgccgatctgcacgaaggtaagggagaactccgcctgcagcagcgggtagatagcgagaataagcgactggatcatatcgttaagcaaatgggacaggctgatcgcgcctaagatgccaaacgaggtgcgtgctttttgcggcggcgcagcggggccggacaagggttgagcggattggttggttgtcataggttcacttcagcgagttctatttgttgtagagaatgcaggttgataccctaaataattcgagttgcaggaaggcggcgacgcagcgaatccccaggagcttactcaagtaagtgactgggatgagcgaggaaagccaacgcacatgcaacttgaagtatgacgggtagaattattatccgactaacatacctgttgataaggtttgaaggaagtcgcaattctgaaaacatatttgtcaacgcgactaactcgctatactttcggcacttgggattaagtcagggagtgaagcatgcattatttcaaacacagcgtagcgctggcgctattcgccgctttatcgctgggcagcctgtcggcacaggcctatgagcaggataaaacctataaaattaccatcctgcacaccaacgatcaccacggccatttctggcgcaatgactacggcgaatatggcctggcggcgcagaaaacgctggtcgatggcatccgtaaagaggtggcggcggaagggggaagcgtcctgctgttatccggcggcgatattaataccggcgtaccggagtctgatttacaggatgcagagcccgattttcgcggcatgaacctgatcggctacgacgcgatggcggtgggaaaccatgaattcgataatccgctgagcgtactgcgccagcaggaaaagtgggctaagttcccgttcctgtcggccaatatttatcagaaaagcaccggcgaacggctgttcaaaccctgggcgttgtttaagcgcggtgggctgaaaatcgcggtgattggcttaaccaccgacgatacggccaagattggcaatccggaatatttcaccgatattgaattccgcaaaccggcggaagaggcgaagctggttatccaggagctgcagcagaatgaaaagccggacgtgatcctggccaccacccatatgggccattacgacaatggcaaccacggctctaacgcgccgggcgatgttgaaatggcgcggagtttacctgcgggatcgctggcgatgatcgtcggcggtcactcgcaggatccggtatgcatggcggcggaaaataaaaagcaggtcgattatgtgccaggcaccccgtgcgctccggatcgtcagaacggcatctggatcgtccaggcgcatgagtggggcaaatacgtcggccgcgccgattttgagttccgcaacggcgagatgaagctggtgcactatcagctgatcccggtcaacctgaagaaaaaagtgacttacgataacggccaaagcgagcgggtgctgtatacgccgcagatcgccgagaacccgcagatgatgtcgctgctgacgccgttccagaacaaaggcaaggcgcagctgcaggtcaaaatcggcagcgtgaatggtcatctggagggcgaccgcagtaaagtgcgctttgtgcagaccaatatgggccacctgctgctggcggcgcaaatggcgcgcagcaacgcggatttcgcggtgatgagcggcggcgggatccgcgactccattgaggcgggggatatcacctacaaagatgtgatgaaggtccagccgttcggcaatgtgctgacctatgtcgatatgaacggcaaggaggtagtggattacctgaccgccgtcgcgcagatgaagccggattccggcgcttatccgcagtttgccaacgtcagtttcgtggccaaagacggtaagctgaacgatctgaaaatcaaaggcgaaccggtggatccggcgaagacctatcggatggcgacgctgagctttaacgccaccggcggcgatggctatccgaacatcgccgataaacccgggtatgtgaataccggctttatcgatgccgaagtgctgaaagagtatatcgagaagaactcgccgctggatgccgccgcctatgagccgaaaggcgaggtgagctggcagtaagcctgggcttcaggttggctatttccccggtggcgctacgcttaccggggctacaagttgggtatcccggataaggcgcgtgcgccgctatccgggatcgttttatcaatcgcggcgggcgatatcggcgaacttcgcatcgagaagctgcgccagatcgctggccgccagctcaatatccagcccgcgtttgccgccggaaatatagatggtggcaaattcctgcgccggggcgtcaatcaccgtcggcaggcgcttcttctgccccagcggactgatgccgcccaccagatagccggtgatacgctgcgccaccatcgggtcggccatgtcgactttcttagcgcccagcgctttcgccactttcttcaaatccagctgcccggcgaccggagtgacggccaccgccagatgcttcatatcgccgttcacggcgaccagcaaggtcttgtaaacctggtcggcattgaggccgagcttgcgcaccacttcatctccgaagttggtctcattgggatcgtgatcgtaactgtggatctgaaaggaaattttgtttttttcgagtaatttaacggcgggagtcatagctatccttcttaccaaccggttttgcgtgacgtcagaatacgcccgcaggttgtctaaaaaatagtaccatcttgcgcaatagtgttggcagtgatggtcactttgagcgacaatcagacgatccgggatgcaaatcccgggataataataatgatgaaattcctctttgacgggccaatagcaatattggccattttttttatgtcagcatatccggcagattcccttcgccatacaggtgcagcgcgccgacggcaaccacgtagcgccccggcggcaaggccagcagcgtctcgcgccaggcgaggttgcgctggtgcatcagcacatcatataaagactggctaaaggtcgtcggcagcgataccgcgccgcgcgacggcggttgctccagccaccagccgatcatgacctgcagtaaacgggcgttggtgcgccagtgggtcagcgtatcctccagcagcgccatccccccgtcgggcagatcgcgcagcagcgcgatttggctgtcggcgccttccagctccatcaccgctatgttgctctcgcgggcggccatcagcaactgataatcgatgccgtaatccggtcgcagccccagcttctgcgcctgggtggcctgcaggaccatcgccacctgccacagcggctggctgtcgaacagcccgaccgacaggcccagctcgccggctcgcgcctctagctcgctcagctgcgcatcgctcaggcgttccgccagcggtgggtaagtggggagattgctaaacggggtttcattgccgctgatatcggcctcgacgattaacgcatcggcctggcgtatttttttcagaagctttgccggcggcggcgccatgtcgcgggtgcccatatggatactgccgacgaggtgcaaatagcgttcgccgggcaggacgatatccatcgcaggccaggaataagacgagccgacggcggctcgccacagcatttttatccggtttaacaggcccatacgcgctccgaagtgtgaggacttcatgctagcgcatatggtgatacacgtcacccttccggcgggcttttcttgtcccggcaaaaaaacgggcgtcgaacaacgtcggcgcccgtttcatctgacagcgtttactcttttggtttaaagcgcagcaggcggttggcgttactcaccacggtgatcgacgacagcgccatcgccgcgccggcgaccaccgggttgagcagggtgccggtcagcggccagaggatcccggcggcaatcgggatacccagcgagttgtagacaaacgcgcccagcaggttctgcttcatattgcgtaacgttgctttcgaaatcgccagcgcatcggccacgccgtgaagactatggcgcatcagggtgatcgccgcggtttcaatagcgacatcgctgccgccgcccatggcgatcccgacatccgcctgggccagcgccggggcgtcgttaatcccatcgccaaccatcgccactttgtgcccctggctctgcagacgcttaatggcatcggctttaccgtccggtagcacgccggcgatcacttcatcaatgccggcttctttggcgatagccttcgcggtggtggggttatccccggtaagcatcaccagccggtagccctgccgatgcaaacgcgccagggcgtcgacgctgtcttcgcgcagcgggtcgcggatggcgaacagcgcggtggcctgaccatccaccgccagcagcaccggcgtggcgccgcgtgaggcctgggctgtcatctcgctttccacctcggcggtattgatatgctgctcgttgagcagcgcctggttaccgagcagcagacgatgaccttccgcctcgccgctgacgccaaggccgcgcagggtgcggaagccgctgacttccggcaatgggccgtcggcagctttatcaaggatcgctcgcgccagcggatggcttgagccctgctccagcgcggcggcaagacgcagcgcggtatgctcatcaacgccagcgaaagttttcaccgccaccacctgcggcttgccttcggtcagggtgccggttttatcgaaaaccagggtgtcgagttcactggcgcgctgcagcgcatcggcatcgcgcaccagcacgccgtactccgccgcccggccaacgccggagataatcgacatcggcgtcgccaggcctaaggcgcacggacaggcgataatcagtactgtggtggcaatgaccagggtatagacgatctgcggcgccgggccgaagaagtaccagatcgcagcgctaatcagcgcaatgacgaccaccgccggaacaaatacggcggagattttatccgccagctggccgatctccggtttgctgctctgcgcctggcgcaccatgcggataattcttgccagcgtggtctggctgccgacggcgctggcggtaaacagcacgctgccatcctgcaccacggtcccggcgtgaatggcgtcgccatcgcctttttgctgcggcaccggttcgccggtgagcatcgcttcatcaaaccaggcttcgccctggcttatcatgccgtcgaccgggacgcggtcgccggtagtcaggcgcagcgtcatgccggcctgaacttccgcgagcggcagatctttctcgccctcgggcgtgacgacccgcgccgaaggcggcgtcaggtcgagcagtttttccagcgctttcgaggagcgctgacgcgcgcgggcctccagcatatggccgaggttaatcaggccgataatcatcgcgctggcttcgtaatagagatggcgggcttccatcgggaaccactgcggccacaggttgacgctcatcgagtacagccaggcgacgccggtgccgagcgccaccagcgtatccatggtggcggtgccgtttttcaggcttttccacgcgctgcggtagaagtggtcgccggcgaagaccatgacggcgagggtgacaaggccgataaccagccacagcgaacggttgtcgtcgctgaccatcatgttatcgccgatcatgccccagaccatcaccggcacgccgaccagcagggcgacaatcgcctgccagcgaaaacgtttcatcgtcgcgagggcggtttcctgttggcgttcgcggcgttgcagatcgtcttcgatcgcctccgcgccatagccggctttctccaccgcctgcactaattctgcggcggacgcactgcccatcactagcgccgtgcgttccgccaggttaacccgcgcctgtgagacgcccggcaccgcggcaagcgcgttttgtacccgggagacgcagctggcgcagctcatgccgttgatcagcagctgttgactgtcatcttcgtcatgggctgccggaagctcaggagtggccgctgtcagtgcttccgacgggattgatgattctgccagcggtttagcctttgggtggctgagctccgcgccgtatccggcttgtttaacggtatcaatcagcgcttgcgcgctggcgctgcccgtcacatgggcttcagtgagggttacttccgcttgctcaacgtcaggacgctgctccagactctctttcacgcgtttgacgcagtggccgcaggagaggccatccagcgtcaggtcgatagtgttagacataaataactcctgaataattttccggtcaacgattgaccagacccactctttcatcgagtattaagaaggttaaaccttccagcaaggggaaggtcaaggagaaaaaatgaatatcagcgatgtggcgaaaaaaaccggcttaaccagcaaagcgattcgtttttatgaagagaaggggctggtgacgccgccgttgcggagcgaaaacggctaccgcacctatagccagcagcatctcgatgaactgacgctgctgcgccaggcgcggcaggtggggtttaacctggaagagtgccgcgagctggtggcactgttcaacgacccgtcgcggcacagcgccgatgtgaaaaaacgcacgctggagaaagtggcggatatcgagaaccatatccgcgagctgcaaaatatgcgcgcgcacctgctggcgctggccgaatcctgccccggcgacgacagcgcggagtgcccgattatcgataatctttccggctgctgccatcgcaaggcgcaggcttaacggacggcgggtctgattcgtagcgtaatcccttctacggcaatcacttcaaccttgctgcccgccgcgaagtcttcatcggcaatcaccggccaggagctgtcgcccacgcggacgtggccgcggccgttcaccagcggggcatccagcgtcaggcggcggcccaccagttgctgcccgcgctggttgagctgggcatcggccgggcgctgcgttttgacgcgcttgcgcagccatttcgaccacagccacgccgccagcagggtgagaacggcaaacagcgtgccttgccattcccagctcagcggcaggagccaggtcagggcgccggtcaccacgccggcgacgccgctccacagcaggtatccgctgccgcccagcatctcggccgccagcagcagcccgccgaggcttagccagaacagatgggggtgtgtgaggatcatgccgatcatgattttttccgatcgccagcgccttctttgatcagctcgctgatcccggcgatcgatcccatcaggctgctggcatccagcggcatcaataccactttgctgttgttagcggcgccaatctgctgcagcgcatcggtgtatttctgcgccacgaagtagttgatcgcctgaatatcgcctgaggcgatcgccgaggagaccatttgggtggcgcgggcttccgcttcggcggaccgttcgcgagcctccgcctgcaggaacgcggactgccgttcgccctcggccttgaggatctgcgactgcttttccccttccgctttcagaatttccgcctgtcgcaccccttcggcctcaaggatgtacgcgcgtttggtacgttcggctttcatctgggcgttcatcgaggcgataagctccgccggcgggcgaacgtcgcgaatttcgacgcgggtgattttcaccccccacgggttggtggcgtcgtcaacgatatgcagcaggcgggtgttaatgctgtcgcgctgggagagcatttcgtccagctccattgagccgagcacggtacggatgttggtcatcgtcaggttgacgatcgcctgctcaagattgctgacctcgtaggcggcctttggcgcgtcgatcacctgaataaaacagaccgcgtcgatggtgacgttggcgttatcccgggagataacctcctgcgaggggatatcgagcacctgctccatcatgttcactttgcggccgatacggtccataaacggcacgactaagcttaatcccggctgcagcgtctgggtaaaacgcccgaagcgctccaccgtccactggtagccctgcgggacaattttcaccgccgcggccacaataaccagcgcgacgaaaataaggataggaataaaaattagcatcaaaaacctcctgtcttgttgcctggcggggcgctacaaggaaatagcgcatgtttaaactgagtatatctttctcctcatcctggagaaaggaaagtgcgataaactagcggtgtttcagaaaataatcaggaagactcatgaaggaaaataacgcgcttttgcgtctcgacggtgtggggtttaagaccgacgacgccgttattttacacaatatcaattttcagcttcgcgccggagaattcaagttgattaccggcccttccggctgcgggaaaagtaccttgctgaagattatcgcctcgctgctcagcccaacctccgggcgcctgttcttcgacgatgcggatgtcgcgacgctgtcgccggaaaggtatcgccaacaggtctcttactgcgcgcagacgccggccctgttcggtgattcggtttacgataatctgatttttccgtggcagatccgcaataaacaaccggaaccgcaggcgctgctggccgacctgcagcgctttggccttgacgaaaatatgctggaaaaatccattaacgaactgtccggaggggaaaagcagcgcgtatcgctgatccgcaatctacaatttctgccgcgcgtgctgctgctggacgaaattaccagcgcgctggatgaaagtaataaacagaatgtgaatgaaattattcatggctacgtaacggaaaaacaggtcgctgttctgtgggtcacccacgatcgcaatgaaatttcgcatgccgatgaagtgattacgctgcaacctgccggcggaaatatgcaggaggtacagcatgaacgggcataacattacgaacgaatcgctggcgctgtcgatggtgctggtgctgatcgctattctggtcagctatcgggaaaagctggcgctggaaaaagatattatctggagtatttgccgggcgatcgtgcagctgataatcgtcggctatgtgctgaaatatatctttaacgtcaatcatgcggttctgacgctgttgatggtgctgtttatctgctttaacgcggcatggaatgcgaagaagcgcagtaaatatatcgacaaagcttttatctcgtcgtttatcgccatcactactggcgctggactaacgctggcggtactggtgttttctggcttgatcgccttcgtgccgatgcaggtgatcccgattgccgggatggtggccgggaacgccatggtggcggtggggctgtgctacaacaatatgggccagcgcttcagcagcgagcagcagcagattcaggagaaactgagcctcggcgcgacgccgaagatggcctcagcgcggctgattcgcgagagcattcgcgcgtcattgattcccaccgtcgattcggcgaaaacggtcggtctggtgagcttgcctgggatgatgtcggggctgatttttgccggtattgacccggtgaaggcgattaagtaccagatcatggtgacctttatgctgctgtcgaccgccagcctgtcgacgattatcgccggctatttgacctaccggaagttcttcaacgcccgccatcagctggtggtgacgcagctgaaaaagcgcccgtgaacgatcccgggttgcggcgttcacgccttacccgggctacttaggctacgttccgcatagttcgcgtagcccggataagcgcagcgctatccggggaaggcaacggattagtacagcagcgaatagagctgacgacgatatttggcggccagcgcatcgccggtaccgagggcggcgaggatctcctgcagcatcttgcgcgcctggccatcgccggcgcctaaatctttctgcagatggctgaacagcagggccagcgcttcttcattacgcccgacctgatgcagctgcagcgccagctgggaggccaactgcgcatcctccggattctgttccacctgctgctgcagctgctggatttccggggtgtcggcggcctgtttgagcagctcaatctgcgccaccagaccctgatagtgggtatcctgatcctgcagaggaatggttttcagcacgctttccgcttcatcggaacggtgcagagcaatcagcgtttccgccagcagcaggccaatctggctttcctgattcgacagctgccaggcttccttcagcagcggcagggcatcggcgtatttttcttcctgcatcagggccagcgcctgctgagctttcagctcctcttcacggggcaggactttatccagcagggcgcggatcgcttcttccggctgcgggccttcaaaaccatccaccggctggccgttctggaacagataaaccgtagggatggcgcgcagaccaaactgtgaggcgagcatctgctcggcgtcgcaatcgaccttcgccagcgtgaactggccgttgtattgggctgccaggcgctcgagcaccggggtcagctgttcgcagtgctgactgcgggcagaccagaaataaaacagcaccggaacgttcatggactgctgtagcgtctgctgcaggttcgcttcgctaatgttgacaatattctgttcggacatgggcatttctcgttagtcgatttctgttttacatgggggcggcattccgcgcttcaactcagccgtggataattttgtccatcgcgcgggcaggcagcaggcgcttaagcatcgccaccgcgtgggtgaccagggtgaccggatagcgcagctttggtttatcgctggtaaaagcatggcgcactttttccaccaccgcctccggcccgagggtaaagcgggcggcgatgcccggattttctacgggcttatcgctttgcgtctggttgacgttatcggtaaagcgggtgcggatcgggcccggttcaatcaggctgacctgaataccgctgtggcgcagctccatgcgcagcgcgtcggaccatgcctcgagggcatatttactggcggcataggctccgcggccgggactggcgataagccccatcaccgaggaggtcatcacgatgcgcccttcgccgtgcggcgtcatcgccggcagcagcagcatggtgagctgatgcgcgccgaaaaagttagcggaaaattgctgttccatctgctggcggctgatggtgttcagcgggccatagacgccatacccggcgttattgaacaggccgtagagacgattatcggtcagcgcaatcacctccgctgccgcgcgctccacgctctgcgggtcatccagatcgagcaaaataccggttagccccagctcctgcatccgcgcgacatcctctgctttgcggcaggccgccagcacgcgaaagccctggcgggttaaatccagcgcgctttccagaccaattccgctggaacagcctgtcactaaaaccgttttttgcataactttacctgtcagcgacccctggcgttcaggagtcatgattaactaagggagccagccgcttcgccatccagtcggcgataaacggctgcgcgtcgcgatttggatgaatgccgtcgtcctgcatccattgcggcttgagatagacctcctccataaaaaagggcaggagaggaatagcgaactctttggccagggccgggtaaatcgcgccgaaggcttcattatagcggcggccatagttcgccggcaggtgaatttgcatcagcagcggctcggcgttggccgctttgatatctttaataatggtgcgcagcgtctgctcggtctgctgcggcggaaaaccgcgcagtccgtcattgccgccgagctcaaccagcacccagcgcggctggtgctgcttaagcagcgctggcaggcgagccaacccctgctgcgaggtatcgccgctgatgctggcgttcaccaccggcgttttcgcctgccactgctcattgagcagcgcaggccaggcggcgttggccgccatccgatagccagcgctcaggctgtcgccgaggatcagcagcgtgtccgccgccatcgcgcggcaggtaaacaggaacaacaacaggaaaggcacatgccagcggaaaacatacttgaagttcatcatcttaagaagtccgtcggtcagggggagcatcagctctccatccttaccggagttgagctggttgtcaaaccgcggcagaccatcgccctgatcggcgagtcgggttccggtaaatcgaccctgctggcgatcctcgccggcctcgacgatggcagcagcggggaagtatcgatgctgggcaaaccgctgcaccggatggatgaagaggcgcgggcggcgctgcgggcgcagcacgttggttttgtttttcagtcgtttatgctgatcccgacgctcaacgccctggagaacgtcgagctgccggcgctgttgcgcggcgccagcgatagccagagccggggcgatgcccgcgcgctgcttgagcagctgggacttggcagacgcctgcaccacctgccggcgcagctctccggcggcgaacagcagcgggtggcgctggcccgggcctttaacgggcgcccggccattctgttcgccgatgagcccaccggcaacctcgatcgccagaccggggacaaaattgccgatctgctgttctcgcttaatcgcgaacacggcaccaccctgatcctcgtcactcacgatccgctgctggcggcgcgctgcgatcgccgtctgcgcctggtggatggccagctgcgggaggaagcatgatcgcccgctggttctggcgcgaatggcgctcgccgtcgctgctgatcgtctggctggcgttaagcctcgccgtggcctgcgtgctggccctggggtcgataagcgatcggatggagaaaggccttagccagcaaagccgtgagtttatggccggcgaccgtacgctgcgcagttcgcgcgaggtacccgccgagtggatcgcacaggcgcggaagtcagggctgaccgtcggcgagcagctgagctttgccaccatgacgttcgccggggatacgccgcagctggcggacgttaaggcggtggacgaccgctatccgctgtatggcaccctcgagacgcagccgccggggctgaagccgcaggcggggagcgtgctgctggcgccaaggctgatggcgctcctgaacctgaaaaccggcgatacgattgacgttggcgatgccacgctgcgcattgccggggaggtgattcaggagccggatgcagggtttaaccccttccagatggcgccgcgactgatgatgaatatggccgacgtggcaaaaaccggggccgtgcagcccggcagtcgcgtcgcatggcgctataagttcgccggcgacgctgaacagctggccaattatgagcagtggctgctgccgaagctcggcccggagcatcgctggattggccttgaccaggacgacagcgcgctgggcaaatccctcgaacgctcgcagcaattcctgttgttatccgcgctgttgacgctgctgctggccgtcgccgcagtggcggtagcgatgagccactactgccgcagccgctatgatctggtcgccatactcaagacgctgggcgccggaaggtcgcagctgcgcaagcttatcgtcggccaatggctgctgctgttgacgctgtcggtgataaccggcggggtggcgggcctggcgctggagcgtctgctgctgctggttctcaaaccggtgctgcccgccgcgttacccgctgccagcggttggccgtggctgtgggctatcggggcgacaggcgtcatttccctgctggtgggcctgcgaccctatcgactgctgctggcgaccctgccgctgcgagtgctgcgtcaggatgtggtggctaacgtctggccgttgaaaatctggatcccggcggttagcgtcgtggtggtgggcctgttggcctggctgctgggcggcagcccgctgctgtggtcggtgctggccggggcggtggtgctggcgctgctgtgcggcctggtgggctggggattgctgtggctgctcaaacgcctgacgctcaaagccttgccgctgcgtctggcggtgaaccgcctgctgcgccagccgtggtcgaccctcagccagctggcggcgttttccctgtcgtttatgctgctggcgctcctgttggtgctgcgcggcgatctgcttgaccgctggcagcagcagttgcccccgcagagcccgaactactttctgatcaatatcgcccctgagcagatagtgccggtgaagaccttcctcgccgaacaccagacgcgggcggcggaattctatccgatcgtccgggcccgtctgacgcagatcaacggtcaatccacggacgggaacaaagacgaagcgctgaatcgcgagcttaatctcacctggagcgaacagcgtccggatcataatccgctggtggccggcagctggccgccgaagccgggcgaggtatcgattgaggaggggctggcgcagcggctggggataaagatcggcgatacagtgacctttaccggcgatacccaggagttcagcgcgaaggtcagcagcgtgcgcaaagtagactgggagagcctgcggccaaacttcttctttattttccccgccggggcgctggacgggcagccgcagagctggctcaccagcttccgctgggataacggtcccgcgatgttgacccagctgaaccgcgagtttcccaccgtcagtctgctggatatcggcgccatcctgcgtcaggtcggccaggtgctctcccaggtcagccgggcgctggaggtgatggtgggcctggtgacggcctgcggcgtgctgctgttgctggcgcaggtgcaggtcggtatgcgtcaacgccatcaggagctggtggtctggcgcacgctgggggcaggaaaatcgctgctgcgcgctacgctgtgggcggagtttgccctgctggggctggtttccggcctggtggcggcgataggcgcggaagtggcgctggcgatgctgcagacgaaagtctttgattttccctgggcgccggactggcgcctgtgggtgttgctgccgctgacgggagcggtgttgttatccctgtgcggcggcgggctggggctgcgtctgttaaaaggaaaagcgctattccgccagtttagccagtaagaatattgcattttgatgatgcgccgccgtttttggcggcgcttttattttaaacgcacaaattgataaatcattgatttttaagagcacaaaacattaaaaacccaacaacacgctatgctgattcgcggttaatattcaactggaaaatataaggtggcttattaatcaaggaaaaactatggcacacacaataaaagcgctggcgatctcgatcggcgcagcattagcgttaacgtcattgccttcccacgcggagattacgctgctgaaacaagatccgcaggcgggcgatccgttaagccggcttaactttaccgtcggcggcagtatccggccgcagttcaacatgatgaccggcgatggcgacaaaggctcctataagcgtaacggttttgacggcggcacccgcttccgcttcgcggcggattactacctgttcgatgatattagctggatcagctactatgagctgggcgtgaacattccggcgctgtttgactgggataaccactacgcggaaggcgcgaacaataccacccgccgcatgctgtataccggcctgaaaagcgatacctggggtacgttaacctacgggcagcagaacagcatttactatgatgtggtgggggtgaaaaccgatatctgggactacgatatgatcggtcaggccccggggaacggtattaatggcgattacgatggctcctatcgttcacgtaatatgctgaaatataagaaaactgtaggtgatgtcgatctttacggctcttatctgttcgaagacagcgaatacctgccgggtaacggcctgcgctacaagcgtaaaggcggtggttctgttggcgcggactaccacatcatgaaggatctgacctggggtaccgcgtggaactacacccgcgcggaaatgcgcgacccgtcaagcgccgacagcaaaacctatgaccagaatatcgtcggtaccgcgctgagctggaccccggataactggaccttctccttcggcggcggctggtatcagaacttcctcaccaccaagaaaaccgatgtgcataattactttgccggtgacgcctgggggattgaatattttgcgggctataaattcccgatcaatcaatacgctgttaaatctattcagccgtactttatgggcgaccgtctggaatatgtgaacggccgcaactatcagcgtatcgataacggtctggggattagcttccagctggattacggtttccgcgttgactacgaacacgtgtttacctccagcaccgacaaccttggcgatatgaacctggtccgtctacgctacgacttctaagcggtcacaactccccggtcgcgcgcgcttaccgtggctacaaatcgcgccgaccggtagcccggctaaggcgtttacgccgcaagccgggacaatagagcatgcgattacttcgccagccaggctgcgacctcctgccagctgccgcgaaagagaattttcccggcttttttccccaactgatagcgatacatcgggtcgtagtactcttccagcagcggtaccagccaggcaaagtgcgcctcggtgctggcggtgcgctgctgctgcaccagcgcctcatcgagccgttcagtgagctgagcaaaacgctgcagccccaggcgacggcggatggcaaacaggccgtgatgcagatactcgccgtatgcctgccagcctttctcttcgccatacgcggcgataaagtcgcgatacatgcgatcgaaatactcttcgcgcagccgttcgaggcgaacgtcaaacggatcttccaccaccgccagcggcgactgcgccatgcggaggcgcaggctctccggtagatgattggcgccgatcatatggccttcatcttccagcacccagcgggtctgctgttcggcttttttaagcaggctgaccgccaggtggttttcaaaggtggcctgcggatgctgatcctgcagggttcgaccgaatgaagaaccgcggtgatgagcaagcccttccaggtcgataccgtccgggcgcgagcagaccagttgagttttgccgttgccggtgcagccgccaatcagcacgatcgggcgctgcaccagttcgtcggtggcctggatcgccgcctggcgtagcgctttatagccgccgacgatcaggggtaatccacgccagcttctttcagccactgctggacgatatgcgagcgctggccgccgcgggcgcagcacaggtaaccgtgcgggtaacgggcgcacgcttccagccacgcctgagtacggctggcgcgcaggtcaccctggaccagtttatggccgagcgccagcgccgcttccggcccctgacgcttgtagcaggtgccgaccgcggcgcgttcttcatcattcatcagcggcaggttgatcgccgccggcatcgcgctttggctaaactccaccggggcgcgtacgtcaatcagtggcgtatcgctggcaagaatggcgcgataatccgtcccattggtcatggggtatcctctgaagtcaaaacagaaatgagctttacagcaagggggggattgtacgcgcctcaaggtgtgccggggaaggggatagatcaaatccccggcacgaagggcttagctgagctgcgattgcgcccagaacaggccgctggtgtactccggcggcagcagcggcttgatcgcttccagcgtcgcgctcaggcgatcggtatcgctgtcggtgaggttcaggtggccgactttacgacccgggcgcacctctttgtcataccagtgcaggtgcaccagcggcagcttcagccagtcgtagttaagatcggtgccgatcaggttgatcatcaccgacgggctgttgaccaccggcggcggcagcggcaggccggtaatcgcccgcagatgcagctcgaactggctgatagacgccccgttctgcgtccagtggccgctgttgtgcacccgcggcgccagctcgttaatcagcagcccctcggcggtaacgaagcactccatcgccatcacgccgacgtagttcagctcgttcatgatcgccgtcagcatgctttccgcttgttcctgctggcgggcattggcctgcgggaaggcgacgctggcgcgcagaataccgtcctgatgcaggttacgggtcagcgggtagaagacggtgctaccgtcatgagcgcgggcgcccaccagcgatacctcgccggagaagttaatcccctgctcgacgatgcactcgccgtagttatcggccggtagctgatcgatttcgttttcccgcagacgccactggccgcggccgtcgtaaccgccaacgcgacgcttaacgatcgccagttcgccaaggcgggcaaacaccgccggccactcgcttttatccgccagcagctgccacggggcggtggcgaggccaagcttgtcaaacagctgcttttgcgtcaggcggtcggcgataatcgggaagacatcgcggttgacgaacgccgggtggcgggccagctcgcgggtgagggcggtttccggccagcgttcaatttctgccgtgatgacgctctgctggaacggcaccgcttccgggtcggcttccaggccgaccggccaaacggcgatgcccagcggctcgccggcctggcgcagcatacggcctaactggccgttaccgagcacgcatacctgtttcatgccgcaccccgcggatccggattatccagcacttcatcggtttgcgcctgacgccaggcgctcaggcgctggtgcagttctgcatcatgctgggcaaggatctgcgcggcgagcaggccggcgttcgcagcgccagctttgccgatggccagggtaccgaccggaatgccgcgcggcatctgcacaatggagtagaggctgtcgacaccgcttaaggctgcgctctgaaccggtacgccgagcaccggcaccagggttttcgccgcaatcatgcccggcagatgcgccgcgccgcctgctcctgcaataatcacctgataaccgtggctttcggcgctttcagcaaagctgaacagcttatcgggcgtgcggtgggctgagaccacttcgacatggtacggaacgttcagggcatcaaggatttctgcggtaaattgcatggtagcccagtcgcttttggaccccatcacgatggcgatacgcgccgaattattgcgggaagacatgcgtcttaaaactcctgtgggtgtgtttcacactgctttagaggccacagagaatagcatgaactgccagcaaggaaaacggttgcgtgcgcatggttagccgtcttttgtctcgcctggaggtgatggcgggagtgcctgattgacctttatctccctcatgatacaggtgataagcagcactaacccccacgggagcatcagggtgcccataagcagtaaatagatttgtaccagccggctatcgtgagggcgggtgcagagcaaataaatggcataaaaatagatagcccacgccagcatcgcacaccagacaaacgtcagcgtgttgccgataacgacgccgattaaggcgatataacttacccctaacggattgaggatcgcgatgatcattccccacatcagcggctgactccactttttcctgctcatgctcgttccttgagagtgacgttgtggaagactagcatgcagggcggggggaagcgcgcaccttcgcccgggcaaaaggcgctttcggaattgtgctcgcgcaggaattagaacggaaagtggattagttcgacgtcgtccggcgtcaccttgaccatcgaaccttcgctgtgccaggcgccaagtaccacgcgccatgcgggttggccgttggcctgcagttcatggaccgccgggcgatgagtatggccgtggatcagccactgcacgtgatgccgctccattgcgtcaactaccgcctgtggattcacatccataatttccattgatttactgctgttggcggctttgctgtcggcgcgcatgcgggcggcgatgcgacggcggataaacagcggcagggccaggaacagacgctggatccacggggtgtggactttggcgcgaaacgccagatagccttggtcatcggtgcacagtgtgtcgccatgcatgatcaagacttcacggccatagaggtccagtcgctcttcttcggcgagcaggatcatcccgctctggcgggcaaagcgctggccgacgagaaaatcgcggttgccatggatgaagtagcacggcacgccggcgtcgacgacggctttgattgccgaggcaatttgttggtgcagcgggttaggatcgtcatcgccgatccatgcctcaaacagatcgccaaggatatacagagcgtctgcctggcgggcttctccctgtaaaaaacgcagaaaaccggcggtgatcgccggttcttctgtttgcaggtgcaaatctgcaataaaaagtgtcgccacgaattactcgctgacggtgacgcttttgatgatcacatcatctttcggcacatcctggtgcatgccgctgcggccggtggcaaccgctttgattttgtctaccacgtccatgccttcaaccacttccgcgaagacgcagtagccccaaccctgcaggctttcgccggagaagttcaggaagtcgttgtcaaccacgttgatgaagaactgcgcggtggcagagtgcggcgcctgagtacgggccatcgccagcgtgccgcgggtgtttttcagaccgttgttcgcttcgttctgaatcggagatttggtcgctttttgtttcatgccaggttcaaaaccgccgccctgaatcatgaagccgttgataacacggtggaaaatggtgttgtcgtagaaaccttcgcggcagtagtccaggaagtttttaactgtttccggcgctttgtcgtcaaacgttttgattacgatatcgccatgattggtgtggaaagtaaccatttttgcatcctgttccgatgagtgtggtgccagcacccggtgtcgggtgagatataggggggtgttatagcataaccgcgggggtcgatgcaccttgcaatgtgtgctgcgtccggtctgaattatgggtattatagagacttcattacccacacacgtctacacggaatcttcgatgttaaaaatttttaatacactgacgcgccagaaagaggaatttaaacctatccatgccggggaagtcggcatgtacgtgtgtggtattaccgtttacgatctctgtcatatcggccatggacgtaccttcgtctcctttgacgtcgtggcacgctatctgcgttttctcggctataagctgaagtacgtgcgcaatatcaccgatatcgacgacaaaatcattaagcgcgctaatgaaaacggcgaaagctttgtcgcgctggtcgatcgcatgattgccgaaatgcacaaagattttgacgcgctgaatattctgcgtcccgacagcgagccgcgcgcaacgcaccatattgcggagatcattgagatcaccgagcagctgatcgccaaaggccatgcttacgtggcagataacggcgacgtgatgttcgacgtgccgacggacccgaactacggtctgctgtcgcgccaggatctcgatcaactgcaggcgggggcgcgcgtcgacgtggttgacgtcaagcgtaacccgatggacttcgtcctgtggaaaatgtcgaaagagggcgagccgagctggccgtcgccgtggggcgcgggccgtccgggctggcatatcgagtgctcggcgatgaactgcaagcagcttggcaaccacttcgatattcacggcggcggttcggatctgatgttcccgcaccatgaaaacgaaatcgcccagtccacctgcgcccacgacggtgaatacgtcaactactggatgcactccggtatggtgatggttgaccgcgagaagatgtcgaaatcgctgggtaatttctttaccgtccgcgacgtgctgaagtattacgatgcggagacgattcgctacttcctgatgtccggccactatcgcagccagctgaactacagcgaagagaacctcaagcaggcgcgttcggcgctggagcgtctgtacaccgcgctgcgcgggacggacaaatccgtcgacgcggcggggggcgaagccttcgaagcacgctttatcgaggcgatggacgacgacttcaacaccccggaagcctattcggtgctgttcgatatggcgcgtgaagtaaaccgcctgaaaaccgaggacgcggccgcggcgaacgccatggcggcccacctgcgtaagcttgctgcggtactgggtctgctggagcaggagccggaggcgttcctgcagagcggcgcgcaggttgacgacgcggaagtggcggagatcgaatcgctcatccagcagcgtctggacgcgcgcaaagcgaaagactgggcggcggcggatgcggcgcgcgaccgtctcaacgagatgggcattgtgctggaagatggcccgcagggcaccacctggcgccggaagtaagccataaaaaaacgcccgcaaaagcgggcgtttttattttcgttgtcaggccgtgacggtcacgctctggccttcaaagctcaccgtctgaccagcgacgattttgcagcgtttgcgggtttccaccgcgccgtcgacttttaccagcccgtcggcgatggcgatcttcgcctgggcgccgctttcgctccagccttccagcttcagcagatcgcacagctcaacgtgcgggtgtttacctaaggaaaatgtcgccatctcaggcctcctcaacgtcgtgatactcttcgcacgcctgcagcgtgttctggatcagggtggcgacggtcatcgggccaacgccgccgggaaccggggtgatgtaggacgcgcgttcggcggcatcttcatacaccacgtcgccgaccactttgccgctttccagacggttgatgccgacatcgaccacaatcgccccttctttaatccactcgccaggaataaagcccggtttgcccaccgcgacgatcagcaggtcggcgttttcgacatgatggcgcaggttttttgtaaagcggtgggtgacggtggtggtgcagccggccagcagcagctccatactcatcgggcgaccgacgatattggaggcgccaatgaccaccgcattgaggccgtaggtgtcgatattgtagcgttccagcaaggtcacgataccgcgcggagtgcacggacgcaggcgcggcgcgcgctggcacaggcggccaacgttgtaaggatggaagccgtcgacgtctttatccggcgcgatgcgctcgagaactttgacgttatcgatccctgccggcaggggcagctgaaccagaataccgtcgatggtcttatcggcattcagagtgtcgataagctccagcagctcggcttcgctggtggtttccgggagatcgtaagagcgggagacgaagcccacttcttcacatgctttgcgcttgctgccgacataaatctgcgaggccgggttgctgccgaccagcaccacggccagcccaggggcgcgttttccggccgcaacgcgagccttcactttttccgcaacctcagagcgtacctgctgcgcaatcgttttaccgtcaataatttttgctgccatcagagagaggattccatctgtatctttacgaaagggggatgaggatattttgtcagaagcgggcctcgctgtcagtcctcgtttgctgttttatcctgtctgaggctaatttagcctgttatgaccatggttattacatggttattggtgcgttgcgcctggccactgagtcgatttacgcgcgcatgagccccagcggtatgcttcttgtacagttggtgggggatatttcgccagcgtcgtataagcccgcagtttcctggcaaaatggattgactcaaccgacgtggaccgtataattccacgcgtttcactccgcgaagcactcgcttctcagggcgcccttagctcagctggatagagcaacggccttctaagccgtaggtcacaggttcgaatcctgtagggcgtgccatttaataatcaatcacttatcaacttcctccagtcgctgatttttccttgtgggacatatttgggacatcttctgcaaaaatttgcaaaaattgagtcaatttgacgtgcgtgctcagttaaatggttaggtgccaggtgagcatatcgacggaccatttcgatgattctaatgtcttgtagtatctgtcggacgatggccagtcagagtacagcattactgctctgtaatatcgaacagaatggttaatgctggttatagctgagtgcagaataagcgctctgcaggaatgtgaaaatatgttgccggtaacaggctaatagtcattatagctttaggttctgtctgactgggttaaatatcgcattttaagctggcgtgaagtacagttgttatagatcaatattgaacactatttgaaagcataccctcgatgttcatccactgcctggaaagatccgaatgaacatcaaattcgtcgccatctccgtattcgctgttgtttgcgtctttgcatcagatatttccatcgccaaatcgaattccttaagcgatgatcaggtcagtcaaaggattattgatgattctgtcgcatcctaccccggtacttgtgcctgtcccttcaataccgcccggaacggcagctcgtgcggtggccgcagtgcctggagcaaagctggtgggtactcacctatttgctacaagaaagaggtaacaaaggagatggttaaggcgtggcgacaagagaatcaatgataacgatcaatatctgaaccaggtgattacttacactggaatagtagtttaaataatattaaatgattatttcgaatactgcagcccatttgcagtaagcactgttctggtagaggcggcagaggccacggcgtatatctttttaccttgtgatatttgaacccagcaaatctatttcccctgcctgatagacttagtgtcaccgtatcctgttactaagagcacggggctacctactcataagacacttcctcttcttacgaggaaaccggttcagcgtgttgtgtgtggagacagtacccatcaactcaaactgataacaaaaagtttaatttttttccccgccgcgctgactatagttagggcactttcacttgcccaataaggtcacgattatgaaattagttatcgcctccgtaatttctctgctcagcttcagcgcgctggcggcgccagaggggacgctcagcgtacacattcttaatcagcaaaccgggctcccttcaccgggggtgcagattgagctggataaacagcagggggagagctggcagcatatcgccaccggtaaaacggatgccgatgggcggattaaatcgctctatccgcaggcggagaatatggagccgggggtgtataaagtgacgtttaaaaccggtgactattttaaaagccaaaatatgaatacgttcttcccggtgattccggttattttcaatgtcacaaagcaaaatcaaaaactgcatatcccgctgctgctcagtcagtacggatactctacctaccgcggcagctgatgacccaagccgctatccagccaacgcctgcgcggcttccgcaggcgtcacgcttttctcgcaccacgatgtccatgcctaacgctcggtctctttctctttaaagtgtttaacggcttcgtcgtacatcgccagcaggccggaaatttcgccttcatattgcggcacgcgctgggcgcgaacgagctcaatcagcagcgcataggctgcttcttccggggccgcatgtggattgatcagtccagacatatcacctccttaacagtgggcctttagcctacccctcggcgggaaaacgcaacagcctgatatgcaaccagtacttcttatatggctcttttgaaacctctgaggcgaagaccacggcggaaatcaattgaaggaggggttatccagaccactggcgtggcggttagcggtgcatctacaccggcaggaggctcatcatcagccaggcgatggcgatgcagataagggtcatcgacagcacaaaattcatggtagctcctcttcatcctttctttactcaacgtaaattttgacagcgatgatcgcctttatccttggcgatttgtgccgctatccggcggtgggctggggaaagacggcctgtttccccgtgaaggccagcaaaatatcctctttgtcagggttatagtgatgacatcaatgaataagctgcatcacattggttatgttggtctttccgcctgaagaatgacttcgggtcgctgataagcttgctgggggaataacaggatgagcactacaccgttaacgctttcttttgccggacaacaaccgcccctcgccctgccgcaggtgccgggaacgcgggggccggtgggagtcgacatgcgcgggctagatcagtccggattctgcagctatgaccccggcttcgccaacaccgccggatgccagtcggcgatctcgtggatcgatacggaaaacagcgtgctattgcaccgcggctatccggtggatcagctggctcgccagtgcgattttctcgaagtggcctacatcatgctgaacggtgacgcgccggatgaggccagctatcaaacctttcgcgagaccatcacccgccatactctggtccacgagcagatagcccgcatgtgcagcggctttcgtcgcgattcgcacccgatggcgctgatgtgcgccctggtgggggcgctggcggcgttctatcatgatgtactggatgtggaaaatccgcagcaccgggcgctggccgccacccggctgctgtcgaaaatgcccactatcgccgccatgagctacaagtacaccattgaacaacccgccgcgtatccgcgcaacgatctctcctatgccggaaatttcctgcagatgctgtttgctatcccggcggagaaatatgttctgaatccggtcatcgagcaggcgatgaaccagatcctggtgctgcatgccgatcacgggcagtgcgcctcgaccactacggtgcgcgcggcgggctcctccggggcgaacttattcgcctgcgtcgccgccgggctggcgtcgctgtgggggccgatgcatggcggagcaaatgaatcgagcatgcgaatgctggaggagattgaaagcgtcgatcaggttccggcgtttctgcgccaggcgaagcgcgatccgcaggcatttcgccggctgggttttggcaactcgcgctaccgtcaccgtgacccgcgcgccgatatcctgcgtgaaaccagccatcgggtgctggcggaggtaggcatgtctgaccgcctgctgcaggtggcgatggcccttgaggacgtggcgctgaccgacccctattttgtggacaatggcctgtcgccaagcgtggatttctataccgcggtgatccttaaagcgatgaatctgccttcgtcgatgtttgcggtggtcaccgcggtcggtcggacggtcgggtgggtggcgcactggaacgagatgcaccaggcgccgctgaccatctaccggccacggcagatttacgttggcgagggctatcgggattacgtctcccgacgcggcgagcggtctgctgagctaaggtaatgccttacaggcaggaggcgcgcggcgtcttcctgcccaggcgggttactactcagagatgccgggagagcagatagtgctcgacggcggtatattcggttaaccgggtatacagcgccaacagggcgctgagaaaagcgcctacctcacaggcctgcggcctgggcgtggcgagtaattgctgtagcgtagctctcagttgatcaaggtcgggcttcagcacatacggtatatgcagggtgctgaggatggtttcagtctgctggaaatcatgacgagatggcaacgcctcgtctgcgcttagccagctcaggataatcaacatgaggcgatttttagcgtagagatacgatttcatggcctgtctcctgtcggtagtggcgcaacaccatcccctgaactttgttcatcagttccacgttatttttcaccgccagcttgctaaggacgcgtgaacggtagtagtagacccgtttgatcgtgagctgcatggtgctggccacgtgacacaacggcattccccccatcagcaggctgattaaaaaagtttccttacgggtcaggttatagctgtcaggtatggcgatatagagcttgtcggcggggggcgatgtcaagcgcggaccgcgggcaagggcagcgctgagcccggcaaaactggtgatgaactctgcgccgagcacaatggcgaggctgcgttcgagctcgctcaacgggtagcctgatttggcaaaaataaagatccggatcaggggattaaacgattttaaactgagcgcgacctgcagtacttcgatgctgacgctgctgtaatcaataaggatggtgcttagccgggctccggcatcggtcgcaaaaaaagtatagaacatctcactctgtccactaaacgggtaacagagtatttctttaatatccagaggcttgctgtttggttcattaatatacgctttcagggcaatattaaaatattctgaatccgcaatgcagatcaacataatgacctcctggcataaatacgctgtgcatgctgtcctgcctgattcgacaatttactgtagagaatacccacctgaaataacatactccctgcgctttcaatccagggggggagaacgtgggaggaggtggttaataatgagggtgagatagttagatcgcatttctcgaatgttttttagaaaataaaaaataaaaattaccttttatttacagtgagttgtgtttttattgtgcgtcagttttatttctttttcaaagtggtgttaagacttttctataaaaagtagaaatggtcctggtggcgaatttgaataataaataatgaagtgagtaggatgtcagtgcagggaaggggttaaaagataacaggttaatccaatggactgagcattaataaattgtacgtataaagtacgtcagggtatttcctgaacgattctccataagcgtggtgatgaggagtgaagatgaaaaaatacagcagaggaatggcatctttcgtggtgatgatgatgctttctccggtagcggcacaggctgctgatggcaaagtcacctttaatggtgaagtcatcgaaaatacttgtacggtagtgaataaagacaagacggtaaccctaccgacggtccagcgttcagcgctcagcagcgcgggtgaaacggcgggcgtggttcccttcaccatcgatctgacgagctgcaccccaggggctgatgtctcggtgtacttcgagaaagatcaatacgtttccacggagggtcgactaaaaaacactctgtctgacggcacggaagcagaaaacgtcgatgtggagctgctgaacactcggtttacgccgattaacctcgcggagaccccggcggtcgctgcagacggcaccattgctcgcccggacgtgatcccggtggcggtggctgagcaggatggttccgcctcgctgcctttctatgcccgctactatgcgaccgacgccgctacggctggaaaagtcgctacctacgtcaactttacggtggtctatccgtaacccctgtccacggccccgttcaggggccgtttatccacccggcaaggaggaggtgaatatgcggcgtatggttctggcactgctgctgtccagctatttaccctcggcggacgccagcatggttattgacggcacacggattattttttccggcgacaaaaaagagatcgccgtccgggccaccaatatgggggagaccccctctctgacgcaggtctgggtcgacgatggccgcgtgcaaaatcaaccggaaaaggatgcggcgccgtttattgtgctgccgccgattgtgcgcatcgaaccgggaaaaggccagagctggcgcctggtgtttaacggcagccgcctgccgcaggatcgggaatcgctgttctggttcaatcttctggatatcccacctgagccgaaaaatggcaagactgacaattacctgcagctcgcgatacggtcgcgtatcaagctgttttaccgtccggcaggcgtggcggcggaaaaaatagccgcggaaaaagccctgagctgggcgctggctcctacgggcaacgggctgcgggtgagcaatgcctcagcgcgctatatcaccatcgacagcatcacccttaacggaaaaaaacacgctgccggcatggtcgccccgttttcctcgctggagatcgcgcctaaaggggtcgcgctgcgcacgctgccagccaaattcagcttcaccaccatcaatgattacggcgcggtagtgaatcataattatcctcagtaaggacattattatgaaattcagggagatcaaggttgggttgatgctgctccttccctggcaggaggcatgggcggcagaggcgtttagttttaaccgcgcccatttgcacggcgccgcgcaggttgatctccagaaatatcaatacggtaatccactacacgccggacagtaccgcagcacgctctcggtgaatggccgggacctgggggaagaaacgtttgttatccaggaacacgatggccagcttgagccctgcatctcaccctcgctgttcgacgctctgcagctgaaggatgcccagtggccaaccgcggccacctgcctgcgtttttcgcagatcgataaggcgatcggctgggagtatgacagcggggaaaacgtcctgcgggtaaatatgccccaggcgctgctgcaaccccattatcggggggcggtgaacctgaaaaaggtggatagcggcgtgcccgccgcggtgctgcgctaccaggccaatagctatcagagcatcgtcgacggggacaccagcagccatcattatctcgggctggatgccagcctgcgcgcctttggctggcggttacatcaccagtccagctaccaggcgcaggaagggaatacgcactgggatagcattgccacctgggctgagagaagtgtagtgaactgggcgtccacgttacggctgggtcagggatggaccgacggaaccttctttgacagcgtcagttttatcggcggcaggctggctaccgatgtgcgcatgctgccgggctctcgccgcggttttgcgccgtcggtcagcggcgtggcgcgcaccaacgcccgcgtaacggtcacccagaacggcgctctgttgtacgaggcaacggttccgccgggcaaattcaccttcgacgatctctatcccaccaacgcaggcggcgatttacaggtgacgatccacgaggcggatggcagtcaggacacctttaccgtgccgtacgccacgctgcctggcctggtgcaggcaggcgcggtctattatgatctgtcgctgggctatctggatgaggacgggatcgccgggcggccgggatttggcgaagccacgctgcagtacggcttcaatgactatatcagcggctataccggcgctaacgcgacgacagattattactcgacgctggtcggcagcgccttcaatacctactggggcgcgctggcggtcgatctttcccgttctgcggcgaagggcagggagcacggctggcaggagggctaccgctggcgggtgtccgcatcaaaatcgtttacatccgatacgcgaatgctgctctcgatgagccacagcaacgacggcaattatcgctccattcgcgatgccgcctgggagcacgaccggcaccccaacgactggcgggagatgacccgctacagcgcgacgttgtctcagcaggccggcagcggcagtctgtcatttaacggaatctggagtgaggatgtccgccaccaccgctggcgctcatatcagctgggctatgccaaccgctatggtcagctcaattattatctgtatgcccagcagagccaggatatccatcaccgcaataatcaggtggtgggcgtctccttttcgctgccgttcgggcaggcgggcagcctgaccacccgctttaaccacgataaaaactacggcagccagctgcagtccagctataccggcagcgcaggcgagaaaaacgccttcagctacggtttgaccgccagctacgacatgccgcgggagaacccaaatgaagccagcgttgcggccaacggtagcctgcggacggattatgcgtacctgaacgccagcgccagcgccggtcgccatcagcagcagtactcgctgggggcgtcgggcgccctggtagcgcatcagggcggcatgaccgccacccccgaactgggggaaaccttcgccattgtggaagcgcccggcgcggtgggggcccgggtggctaaccgccttggacagccgattaaccgccagggttttacgatcatcccttacctcgatccctttaccgctaactggctggatctcgatccgcagggtctgaacgaccatgtggagattgtctccagcagcacgacggtggtgcccgattcgggcgcggcggtgaaggtcaaatttgtcacgcgtaccggctatgcctggtttgcccatgtcacgctgccggatggcgcggcgcccccgctgggcgcggaggtgttcgacgacaacggtcgggcggttggcgccgtcggtcagggcgggctgctgtatgcccgggtgccgcaggaccacggcagcgtctcggtagtatggggcgaacgcagcgggcaacgctgccggttggcctatgccatccgcgacgacgcggtgcagcaggttagcagcggcacgccgcatcaggtctgccggccgggaataaaggagaagtaatatgaaaaaaatcatcgcatcaggggtacctcttctgctggccggcgggtactgcgcttcgctgtcggcagcgtgtcagatggtcagtggcaaaactatcgagtattcagtgaacgtcagccaggccagtatcaaccttgacgtcagcgatctccccatcggctccctgctatacagctacggagggatgattatcactaataacgaacgctgggagatcgcctgcagcggcagcgagcccggcgggtttcagagcattggcggttcccgggtcggcccggcgggagacggcaagccgggggatatctacagcatcgaccgcctgccgggcatcggctacagctttcagatgggggaacaggatggcattaatttcgatcccctgttcacggcctggccttccgcgccggtattttccggccagcgcgcatttcaggcggagaataaaaaaccgaccatctatttctggcggattgccgataacggcggtctaccgctgccgggcgaatattgccttaatgattaccttggcgatatttatcttggcggagtacaggcgatgcgcttcagcgtcagcgggctctgtattcaggtcaaatcacccacctgcaagattactgacgacagtaaaaacattaacgtcttcctcggacggcataacaaaaccgcatttaccgggctcaacagcaccaccgccccggttccttttaacatcaacctgacgaactgtgaaaatgtcggcagcgtgtttatgcagtttaacgcgacggtggacagcgctgtcgccgccaacgaagtgattaaaatcgatgaccaacctgaaggggcatccggacttggcgtgcagatcctcagtgccggcggctcgctggtgccgctaaaccaggtgagccaggtctggtccgggaaaaaaggcagtcagacgaactatcgtttatcctatcaggcccgctatatccagacgcagcccgcagtgactgcgggcgaagcgaacgccagcgcgaccttcgtggtgacttataactgatctgcctggcggcgcggcgccgtcaggcatgcgccagtaaaggaaacatcaacttcctgtctttaaacaggttttccttctggtcatagacgaagaggatatcttctccctctatcttctcatactcgccgagccggtcttcactgggggtaaaaccgaggatggcctggtaaacgtggtcatcggccagttcgttgaccagcgtcgacaggctcttacccacgtcgcagaacagatcaaagcagatcagcaccggaccgttttgcatggcgatgaccaccgcctcattttttgccgagtaatagacaaaatgcttcataaaggctgagcagtaaaacatcagcaggccaaagttatgctccacccgcagcggtgagaacgggttggatttttcatagtaatggcggagcagggcgacatcgtcagggctgtccatatccagtttacgaaaatcaccggctcgcggggagaccggcataatatattgatactcttcgctgcgggtgaagccaaatttggggtaaaaatccaccgtggtgggattggcgaataaaaagaaggcgtccgcctcctgctgccagtcctgcaggatgtgatggataagctggccggctaatcccttattacggtggtccggctcggtcatcacggtgccaatctgaatataacgccggggctcgccctgccagcgcaggtcgatgatgttggccgaagcgttagcgataactttattgcgttcgacaaaagcataggggatataggcatcggtccagtaaccttgctgataccactcttcaaaagacaggtcaaaagtcttaacggcaaggtcaatgaagctttttcttaatgggttattttctctgacttgcttcactaattgataattcattgtcatagttccttctcacaatggcttctgaaagcggcgacgtcggcaaaggcacttgcgtcgaatgagcgctgtaaacgtagcatatctgggaaaaggatcagcaatgtcgatgcttaacctttgccccagtcacaaataaccgcatgctgaccgtgtcagaccggtctgaacggcctgtttgcattcgctaccgccataataaagcgtgagtaaaagaggtattggtcgagaggctgaggcaaatgtactggctattttatcgacaatcggccgagccgtagaggttaggtttatttatttatgcattaaacaggaaattttacgcgttgcgtctaataatagagtagtccccagcgtaagggctgaatttatcctggaatcggcttataataacgcgctttgtgattgagtattaccgcacgaattggaaaaatactacgtgcaggatccgctactttatttcgcggtttttgctcagctattattgagtgaattaacaggattactatgtcaaatttacccaaattttcccgcgcgctgttgcacccgcgttactggctgttgtggttgggaattggctttttgtggctgctggtgcaattaccgtatccggtgatctaccgtctgggaacggcgcttgggcggctggcaatgcgggtgatgaaaagccgcgcgcggattgccagacgtaatctcgaactctgctttcccgagatgagcgccgccgatcgcgaggcgctgctggtgaaaaactttgaatcgctgggcatggggctgatggagaccggcatggcctggttctggccgacgcaccgggtagcgcgctggaccgagaccagcggcgttaacgaggtggtggagcttctggaagaaaagcagggcattttactgatcggtatccattttctgaccctcgaaatgggtgcgcgaatgtacggcatgtttaccccaggcattggcgtctaccggcccaacgataacccgctgattgactggctgcaaacctggggacgcttgcgctctaacaagaccatgttggatcgaaaaaatctgaaagggatggtcagggcgctaaaagagggggaaattctctggtacgcgccggatcatgactacggtccggccagcagcgtcttcgccccgctgtttgccgtcgaacaggcggcgaccaccaccggtacctggatgctggcgaaaatgtccggggcgacgattgtgccgtttgttccgcggcgcaagcccaacggcatggggtatgaattgatttccctgacgccggagcgcacgccgccgctggcgagcgccgaggttacggcggcctggatgaatcagattatcgaacagtgcatcctgatggcgcccgagcaatacatgtggctgcaccggcgctttaagacccgcccggaaggagtaccgccgcgttactgaacgcctcggccaaaaaataagcgcatcggtagcacgcttagtaaatcgccgtctatactgaaagggcctgactgaaggctaattccaaggagattgcaggatgaaaaaagtgatagtcgcgttagccctttccgccgttgcatttggcgcctccgccgcgcagttgattaccaaagaagaagtgaaacacttcaaactgaccaaagtcgggccgatctcggtggggccgtccggtggcgaattctcttcgccttccgatctgcacgatcagctctccaagctggccgatgagaaaggcggaaagtactacgtgatcaccgctgcgcgtgagcatggccctaactttgaagccacagcggaagtgtataaataaccttttttaaagcgtgccgtatcggcgcgcaacgcactgagcctggagcgcgttaagcctccgggcttatttttttctgctatcggaattgccttaggcaatagcggcagcggaaatgcgtttttatcgctatatatagatttcatgatcacgatgttaatgaattattgctttttattattaataaagagccaattccggcctaatgcctgagggagtgacccctggcaaaaataggtaggacaaatgtgttatcatcgcgcctttccctttttgtctggggctttcttgtatgctacaacctgttgttcgcgtcggtgaatggctggtaaccccctctgtaaaccaaatcagcaggaaggggcgccagcttacccttgaaccgcgtttaatcgatcttctggtcttttttgcccgccatccgggggaagtgcttagccgggacgagcttatcgaaaacgtctggacccggaacgttgtgaccagccacgtcgtcacgcagagtatttctgaactgcgcaagtcgctcaaagacggcgacgacgttagccttgagtacatcgcgacggtacccaaacgggggtataagctcacggtgccggtgatctggtgcaccgaagagggggaggagctagccccgtcgatggaggcgctgacgccttcgccgtcgaccgccgttcctgcgccgccggccgccggtgcgccatccgacgtctctgtccctctccctgatgccgccgcgccgccaccggctcctaccgtggccagcgcgccgtcaggccgcaagcgcctcactaccgccctggtgtgggggctgttcctgttggcgctgggcacctgcgtggcgctggtggcgctgtcgagcatggaatcgcggccgccggtcaacaaggcgcgtctgctgctcaatccgcgcgatatcgatatccacctggtgaatggcaactcctgcgctaactggtcgtcgcagcactcctacgccgtaggactggccagcctgatcaccacctcgctgaacaccttctcgacctttatggtgcatgacaaaacggactacaacatcaatgaaccaagcagttccggcaaaacgctgaccattgagttcgttaatcagcgccattatcgggcgcagcagtgctttatgtcggtccagctggtggacaacgccgacagctcgacgatgctggataagcgctactttgtgaccaacgataaccagctgaccatccagaacgatctgatgaacagcctgtcggatgccctggcgcagccgtggccggcgcgaatgcaggcgatgctcaggcaatatcagccctcgcaaagcgtggcgttaacctatttctaccagtcgcatcagctgttaatgaagggcgatgtcgattcattaagtaaggccagtagcctgctggatgatgtgattaagcgggcgccggattttatttacgcctatgccgaaaaaacgctggtggatgtattgcgccattcgcaacagccgcttgacgataaacagctggccgccctctacagtgaattcgagcgggtaggggcgatgccgggtataaaagacatggcgatttattatcaaataaaagcggtggattcattggggaagggcaaagtcgacgaagcaaataccgcaattaatagtgcgattgatttagagatgtcatggctaaattatgtgctgttagggaaagtctatgagatgaaaggtgagaaccgtctggctgccgattcttacatcacggcgtttaatttacgtcctggcgaagataccctgtactggattgaaaatggggttttccagacatcggttaaccgagtagttccatatctcgacaactttctctcttcagaataagtaaaccctcatcatgtgcaaggttttggacatggtgaggttaaatttatgtttctcatgaagcctcttgttgttatttttatttagcattcaggaggctttaaataacagtcagataacacgttctccttcttctaactcactgtaattcaacgatgtttatctttttatgacaccctgttgtcatttttatatgttaagcgaaaaaggtcaaaatatcatttgtctgatgtttgtttttatatcactttatctttaggacttatctcgtacaaatcagtaatcttgttggcagttggtcgggtcaattaatggttctgtatcatgatctgtacctcccaaataaacttaggagaaaaacaaccatgagttctgccaagaagatcgggctatttgcctgtaccggtgtcgtcgccggtaatatgatggggagcgggattgcattattacctgcgaacctggccagcatcggtggtattgccatttggggctgggtaatttcaattattggtgcgatgtctctggcttatgtttatgcccgactggccactaaaaacccgcagcagggcggtcctattgcctacgctggcgaaatatctccggcattcggtttccagaccggtgtcctttattatcatgcaaactggattggtaacctggccatcgggattaccgcagtttcttatctctctacgttcttcccaattttaaataacccggtgccagcaggtattgcctgtattgccatcgtgtggatctttactttcgttaatatgcttggcgggacctgggtcagccgtctgaccaccattggtctggtactggtgcttattccggtagtcatgaccgcggtcgtcggctggcactggtttgatgtcgctacctatcaggcgaactggaatacctccagcaccaccgatagccacgcggttattaaaagtatcctgctctgcctgtgggccttcgttggcgtagaatccgccgccgtgagtaccgggatggtgaaaaacccgaaacgtaccgtgccgctggctaccatgctgggcacagcgatggccggtatcgtctatatcgccgcgactcaggttatcgccggtatgtatcctgcttctcagatggccgcgtccggtgcgccgttcgcaattagcgcctctaccatcctcggcggctgggctgcaccgatggtatccgctttcaccgcctttgcctgcctgacttctctgggctcgtggatgatgctggttggccaggccggtgtacgtgccgccaacgacggtaacttcccgaaagtgtatggcgaagttgataacaacggtattccgaaaaaaggcctgctgctggccgcagtgaaaatgaccgcgctgatggtgctgattaccctgatgaactccgccggtggtaaagcctctgacctgttcggcgaactgaccggtatcgcggtactgctgaccatgctgccttacttctactcctgtgttgacctgattcgtttcgaaggcatcaacatccgtaacttcgttagcctgatttgttcggtactgggttgcgtgttctgcttcatcgcgctgatgggcgcaagctccttcgaactggccggcaccttcatcgttagcctgattatcctgatgttctacggtcgcaaaatgcaccagcgccagaacaacgcatcggataacaacaccaccgctaacgcgcactaatcagcaacccgttttcctgaggctccttccatcacctgtcatcacgcgacgggaggggctttctacatctggagatttgactatgaacgttattgcaatcatgaatcacatgggggtttacttcaaagaagaacccatccgtgaactgcatcgtgctctcgaacgcctggacttccgtattgtctacccgaacgaccgtgacgacttattaaaacttattgaaaacaactctcgtctgtgcggcgtgatcttcgactgggataaatacaatctcgaactgtgcgaagaaatcagcaaaatgaacgagtacatgccgctgtatgcgttcgctaacacctactccactctggacgttagcctgaacgatctgcgcatgcaggttcgcttcttcgaatatgcgctgggcgctgcggaagatatcgcgaacaaaatcaaacagaacactgacgaatacatcgacaccattctgccgccgctgaccaaagcgctgttcaaatatgtccgtgaaggtaaatataccttctgtaccccaggccacatgggcggtaccgcgttccagaaaagcccggtaggcagcatcttctacgatttctttggctccaacaccatgaaatccgatatctccatttcggtttctgaactgggttccctgctggaccacagcggcccgcacaaagaagcggaagagtatatcgctcgcgtgtttaacgcagaatgcagctacatggtgaccaacggtacttctaccgctaacaaaatcgtcggcatgtactccgcgccggccggcagcaccgtgctgattgaccgtaactgccacaaatcgctgactcacctgatgatgatgagcgacattacgccgatctacttccgtccgacccgtaacgcctacggtatcctcggcggtattccgcagagcgaattccagcacgcgactatcgccaagcgtgtgaaagagacgccgaatgcgacctggccggtacacgcggttatcaccaactcaacctatgatggtctgctgtacaacaccgacttcatcaagaaaaccctggatgtgaaatccatccactttgactccgcgtgggtgccttacaccaacttctcgccgatctatgaaggcaaatgcgggatgagcggcggccgcgtcgaagggaaagtgatttatgaaacccagtccacgcacaaactgctggcggcgttctcccaggcgtcgatgatccatgtgaaaggcgacgtaaacgaagagaccttcaacgaagcctacatgatgcacaccaccacctctccacactacgggatcgtggcctccaccgaaaccgcggcggcgatgatgaaggggaacgctggtaagcgtctgatcgacggctctattgaacgttccatcaagttccgtaaagagatcaaacgtctgaaaggcgagtctgacggctggttcttcgacgtctggcagccggagcatatcgatggtcctgaatgctggccgctgcgttccgacagcgcatggcacggtttcaaaaacatcgataatgaacacatgtacctcgacccgatcaaagtcacgctgctgactccggggatgaagaaagacggcaccatggatgacttcggtattccggcaagcatcgtggcgaaatacctcgacgaacacggcatcgtggtagagaaaaccggtccgtacaacctgctgttcctgttcagtatcggtatcgataagactaaagcgctgagcctgctgcgtgcgctgaccgacttcaaacgcgcgttcgacctgaacctgcgggtgaaaaacatgctgccgtcgctgtaccgtgaagatcctgaattctatgaaaacatgcgtattcaggacctcgcgcagaacattcacaaactgattgagcatcacaacctgccggatctgatgttccgcgcgtttgaagtgctgccatcgatggtgatgaccccgtatgccgcgttccagaaagagctgcacggtcagacggaagaagtgtatctcgaagagatggtcggccgcgtcaacgccaacatgatcctgccgtatcctccgggagtgccgctggtgatgccgggtgagatgatcaccgaagagagccgtccggtgctggagttcctgcagatgctgtgcgaaatcggcgcccactatccaggcttcgaaaccgatatccacggcgcctatcgtcaggcggatggtcgttacaccgttaaagtgctgaaagaagagaataacaagtaatagacgcacaccagggaagtggcttgccacttccctttttcacgctgcaaggagaacacatgaaaacaccctcacagccgcgcgcgatttactacatcgttgcgatccagatctgggagtacttcagcttttacggcatgcgcgccttactcatcctttaccttacccaccagcttggcttcgacgacagccacgccatcagcctgttcagcgcttacgcatctctggtttacgttacccctattctcggcggctggcttgccgaccgcctgctcggcaaccgcacggcggtaattgccggggcgctgttgatgaccctcggccatgtggtgctgggcgttgagtcgacctccgcatggagtttgtacgtcgcgctggcgatcatcatctgcggctacggcctgtttaaatccaatatcagctgcctgctcggcgaactgtacgctcacgacgacccgcgtcgcgacggcggtttctcgctgctgtacgccgccggcaacgtcggctcgattgccgcgcccatcgcctgcggactggcggcgcagtggtacggctggcatatcggcttcgcccttgcggggatcggtatgtttatcggcctgatgattttcttaagcggcagccgccacttccggcatacccgcggcgtcgataaaccggcgctgcgggcggtgaagttcgtgctgccgacctggggctggctgctggtgatgctctgcctggcgccggtatttttcacgctgctgctgcaaaacaactggtccggctatctgctggcgatcgtctgcctgttcgccgcccagatggtggcgcggatcatgatcaaagccccggagcatcgtcgcgcgctgtggcagatcgtcctgctgatgctcgccggaacgttgttctgggtgctggcgcagcagggcggaagctcgattagcctgtttatcgaccacttcgtcaatcgtcgtctgctgaactgggacgtgccgaccgcgctgttccagtcagttaacgcgatagcggtgatggcggccggcgtggtgctggcgtggctgatgcgcccggaaggcagcgtgcgttctgtgctgcgcgtctggctgaaattttctttcggcctgctgctgatgggcggcggctttatgctgctggcgctcaatgcccgccatggcgcggctgacggtcaggcctcaatgggcatgatggtcgccgggctggcgatgatgggctttgccgaactgtttatcgacccggtggcgatggcgcaaatcacccgtctgaacatgcccggcgtcaccggcgtattgaccggcatttatatgctggccaccggcgcggtggccaactggctggcgggcgtggtcgcccagcaaaccaccgaatcgcaaatcagcgatacggcgattgccgcctatcagcatttcttcgcgcagatgggcgaatggacccttggctgcgtggcggtgatggtcattatcgcctttgccgcggcctgtagcgtcggcaaacgtcgtgcggctgccggtgaaattaccggcggcggcgcctgacgctcgtcccggctcgtggcgtaaacaccttgtccgggccgcgattcgtagccccggtaagcgcagcgcgaccggggacattacctcaacagcggagcgcgaagtcgctccttgcacagcttagtgaacaggaggaggatattctggcatgcgcggaggccaacgataaaaaataccgttactgaagccatagctgagtgagatcagcttggagtgaatccaggatcgttaagattgtgctctggtgtcttcccagagacaggccgcgcggaagggtgacctggttcaatttatcgaagctagtttgaaagcaaggttatgaggaatccatatgtctgaacaacaagcacaaggtgccgatgaggccattgaccttaataatgaactgaaagctcgtcgcgaaaaactggctgcgctgcgtgagcagggcgtagctttccccaacgatttccgtcgcgatcatacctctgaccaattgcatgctgaattcgatgcgaaggacaacgatgaactcgcttccctgaacgttgaagttgcggtggctggtcggatgatgacccgtcgcgtgatgggcaaagcctccttcgtcaccctccaggacgtcggcggccgcattcagctgtacgtggcgcgcgatgacctgccggaaggcgtctacaacgaacagtttaagaaatgggacctcggcgatatcatcgccgcccgcggcaagctgttcaaaacgcaaaccggcgaactctcgatccactgcaccgagctgcgcctgctgaccaaagccctgcgcccgctgccggataaattccacggcctgcaggatcaggaagttcgctatcgccagcgctatctggatctgatcgccaacgaagagtcgcgtcatacgttccgtatccgttcgcagatcctcgccaccatgcgccagttcatggtggctcgcggctttatggaagtcgaaacgccgatgatgcaggtgatcccaggcggggcgtccgcccgtccgttcatcacccatcacaacgcgctggatctggatatgtacctgcgcatcgcgccggaactgtatctgaaacgtctggtggttggcggttttgaacgcgtgtttgaaatcaaccgcaacttccgcaacgaagggatctcggtacgccataacccagagttcaccatgatggaactgtatatggcgtatgcggactacaaagacctgatcgaactgaccgagtcgctgttccgcaccctggcgcagacggtgctgggcaaaaccgaagtgccgtatggcgaccaggtgtttgatttcggcaagccgtttgaaaaactgaccatgcgggaagcgatcaagaaacaccgtccggaaaccaacatggcggatctggataacttcgacgcggcgaaagcgctggcggaatctatcggtattcaggtagagaaaagctgggggctgggacgcatagttaccgaaatctttgacgaagtggcggaagcgcatctgattcagccgaccttcatcaccgaatacccggcggaagtttctccgctggcgcgccgtaacgacgtcaacccggaaatcactgaccgctttgaattcttcatcggcggccgcgaaatcggtaacggtttcagcgagctgaacgatgccgaagaccaggcgcagcgcttccaggatcaggtgaacgccaaagcggcgggcgatgacgaagcgatgttctatgacgaagactacgtgaccgccctcgagtacggcctgccgccgaccgcgggtctgggtattggtatcgaccgcatggtgatgctgtttaccaacagccataccatccgcgacgtgatcctcttcccggccatgcgtccgcagaagtaatccattgcactccctcccggcctgcgccgggaggttctccctgcattatccccggcctgtcggcagagcgatgttattacaggactttttgcagggagccgcgctgtctgccgtttgcccatacgccgttaaaggcgtcgttcagcgtaaaggctgagcttttcacccggaaggtcagtttaccctggctggctttcgcctcctcgaccagatgaccatgggttttcaccgttttagcggtgacggtaatctcatcaattttatcgccatactccgtataaacataccaggtgcccacccaggggccgaagccgctgctggcgtgctgcgcggcggcggcattctcggctttggttttatgaatatcgcaggtggtcccatcggtcatctgcgtgcagccggaacgttcaagctgttcccggtatttcgcgctaatggcgtgggccggcgcggcggcgaccagcgccagggtgagggtggtgaaaagccaggtcttattcatcttattgtttctcatcgcgatagcggcgtgccgggccatagagagggatacacgttggtgtattctcccgttggcgtcagaataaaataacccaaccagtcctgataagtaattagcaagacgctgtggggttatttattagtaaagcatcaaagtttcatgcttatttcgcaagccaaccttcccactgcgtgtcatattattgcagagagaatgttaattatttgatgttttaaaagcggctatgtgtcattcaggcaaataacagcaggcctgtccttggcgcacggcaaaagcccgctctggtgcggtgttgagtttttttcatattgctatcatcatatttcgaatgaaagggataacctctgaagcgggttattaagccagtaatttttatccgcaaaataagccggcggcaagcattatttccatttatttttcagggttacctgaaatagcgaatataccgccagtgcaatgatggatttccatcatttctccgttttcatcgtcggtcgtcacctgcttatagtgacgccagacaagaccacagggtggaaaggagaacaagatggcgacagagcaactgcggtggggcgtgagccccctgtgctggaccaacgatgtactcgaggatttaggcggtgatattcccctggatacctgcctgcgcgaggcgcgggaggcgggctatcagggcattgagttaggacggaaatttccccgccaggcatcaaccctgggcccgctgctggcggcggctgacctgcgcctggcgtccggctggtacagcggcatgctggccgaccgcagcgtggaagcggagctggaggcggtgcgggagcacgcccagcttctccggcagctcggcgcgaaggtgatggtttacggcgaatgcgggcaactgccaggtgaaaccccgcttgatgagcctatttcgctctcgccgccgttaagccgcgtcagcctggcggcgtattgccacaagctgaatacctttgctgacctgctgctgcgcgactatgacctccagctggcctatcaccatcatctgatgatgctggtggagcacgatgacgagctggagcggtttctgtctcacacccatgacaacgtcgggctggcgtttgataccgggcacgcctttgtcgccggggtcgagatcccgcgcgtactgcacaaatatggccaccgtatccgccatctgcatctgaaagacgtgcgtccccaggtgctggggcgtctgtatcgggaaaacctgagctttaacgaggcggtgcgcgccgggctgtttaccatcccaggcgacggctgcatcgactatgcgccgatcctcgactttgtccgggacagcgactaccgcggctggctgattatcgaagccgagcaggacccggcgatggcgccgccgctggccaccgccagccgcgcctatgcctggctggcgcaccatttatcttccccttcatcgtcagaggagtatgcatcatgagcgcgcggttaaatatcggccttatcggctcaggttttatggggcaggcacacgctgacgcttaccgtcgcgcggcgatgttctatcccgatctgcccaagcgcccgcatctctacgcgctggcggatcaggatcaggcgatggccgaacgccacgcggcgaaactgggggcggaaaaggcctacggcgactggcgcgagctggtaaacgatccgcaggttgatgtggtggatatcacctcgccgaaccatctgcactacacaatggcgatggcggcgatcgcggcgggtaaacatgtctattgcgagaagccgctggcggtcaatgagcagcaggcgcaggagatggcgcaggcggcacggcgcgcgggggtgaagaccatggtggcctttaacaacatcaaaacgccggcggcgctgctggcaaagcagattatcgcccggggagatattggcgaaccggtgcgctttcgcggcacctttgatcaggggttttataacgacccgaacctgccctggtcctggcgctgctcgaaaaccctcggcggcagcggggcgcttggcgacctcggcgcccataccctgtccgtcgcccagtttttgctgggcgggatccgtgaagtgaccgccagcgcgcaaacctgcctgcgccagcgtccggtgccgcagaccgatgccgggtatgccagccgggtcgcggtcgatgccgagtggcgggaagtggaaaatgacgatcaggttcagtgcctggtcaatttcgacagcggcgccgcgggggtgattgaggcctcgcgcatcgccgccgggcggatcttcggcgtgttctgggaggtctccggcaccgaaggcacgctgtatatggacggggagcgctttaacgagctgcaggtctatcgcttcaacgatgataaacatgaccgcggctttaagacgctgtatgccgggagccagatcccggcctatgccggcttcttcggcttcgattttggcggcggcgggctgggctattttgacgtcaaggtgatcgaagtgcatgacctggtgcaggggatttgcggggagggcgactgctatcccaactttgaatttggtttgcagaatcagcgcgtgctgtcggcgattgaagcctcgatggccagccgtcgctgggtgaacgtggttaaagactaaggagccgctatgtttccgtcacacttaccaaccccgcgccgcccggcggcgcagagcattcccatcctgcgctggggcattatcggtcctggctggatcgccgagcgctttgtgcactcattgaaaacctacagccggcagcaggtggtggcggtggtttcccgcagccaggcgaaggccgaccgggtggccgcggaatgggggatcccccaggcttacggccaggtggaggagatgctggcgcgtccggatattgatgcggtgtatattgcgacgccgcacaaccatcactttcccgacggcatgcaggcgctgaaggcgggcaaacacgtgctgatagagaaacccttcgccctcaacctcggcgaagggcgtgagctgcaggccgaagccgcccgccaggagaagctggcgctggaggcaatgtggtgcgattacgcgccgaaatatgatgtgatccgccagctgctggaggatggggcgctcggcgacctgcataccctgctggccgatcacggcgagtatttcacccgcgaccaccgcatcttcaatgccgatcttgccggcgggccgatgatggacctcggcagctatgtgacctcgtttgcgctgatggtgggcggcatgccgcaggagattgtcgcccgcggcagcgccacggcggaggggctgaacggtcagacgtcgatgctgtttagctggcagaacgggatgcaggggttgttaaacaccactttgttcagcaacacgccgggcggggcggtggtggccggacgccaggcgaccctgacgatcgacggccagttttacgcccccggcggcttcacgctcgccgccagccagggcgggcaggtgctgcgctgggaagagccgcgcaatcgctacgaccagctgttctggcaggcggagcattttgcctggtgcatcggacagggggtgcaggactcgccgctgcggccgctcagtcgggtgctgcagaatctgcaggtgatggatgaggtgcggcgccaggtgggcgcggtgtttaacgaagaacgttaaggagccggccgggcattggtttgcagatagcgcgagcgtatttgccattgcccggcaaaaggacgcgtacgatgcctgatgtctgttgcccggcggcgctgtgcttgcacgggcctgggatatctatgcaaccgtttgatattaaatcagattagtgcctgtgttatgtaggccgagcaaggcgacgccgccgcccggcataaaacggctccgcgtcggctgttcttgcccggcggcgctgcgcttgcacgggcctacgatttcactgcaaccgtttgatattaaatcagattaatgcctgtgttatgtaggccgggcaaggcggcgccgccgcccggcataaaacggctccgcgcccgctgttcttgcccggcggcgctgcgcttgcacgggcctgggatatcaatgcaaccgattgatattacggtgtatgaatgcctgtcttctgtaggccgggcaaggcatcgccgccgcccggcataaaggcaggtacagcgcctgatagcggttgcctcgcacccgctcagcgacagtcgtcgacggcgacaaactggccatgctgcagggactgaactgccgcttcggcaatggcctgcgcctgcaggccgtccagcaggccgggcaggtcggcgacggtttcaccattcagggagcgaataaaggcgtcaagatgctggtaataagatccctgtacccggctgaaccagtccggccacaggcccggctcaatgcgctgattgccgcgccacagggtagggcccgccggcgactggctaccggactccagcgcgccttcggcgcccagcagggtgatccgttcatcgtacccgtggccggtgcggcgggtattgtccagctgcgccagcgcgccgccgcgcatctgcatcatcaggatggaggtgtcgacatcgccaaattcggcaatgtccggcagggccagcgccgcgcccatcgctgctacggtgcgcacttcatcgccagtgagaaagcgcaggagatcgaagaagtggatcgcctgatcgcgcatctggccgccggagctgcgcagatagtcgagcggcggcatgctggaggcgcggcagaccatctgcaccagctcgacccggccgatcagcccttgctccagctggcggcggagctgctgatggctgctatcgaagcgccggttaaagccgacagtgaccggcacgttcagggggagcacccgctccaccacctcacgggcgcgcgccagggtgaggtcgatcggtttttcgcaatagaccgccttgcccgccctggcggcggcttccagcagttcggcatgcgacggggttgaactggcgatcagcaccgcgtcgatggcgtcgctatggatcgcctcgctcacggtcaccgcccgggcgccatagcgggcggccagcgcctgggcgcgctccggggcggcatcggccaccatcgtcaacgcacttccttcatgacgagcaagactggcggcatgaacctgaccgataaaaccactgcctaccagggcaaaacgtttgcagatcatttttttctccagaatggcgaggggacgctgccaccataatcggtttgctaaactcactgacactgccgttttgatggatttccatcatgaagagaggggcgatgaaaaacatttcactggcgatgctggccagacagattggcgtcggcgtggccaccgttgaccgggtgctgaacgagcgcggcggcgtatcgccgcagaccacgcgcaaagtgctgcaggcggcgcgcgaggcggggctgaagcggatcctgccggaggagcaccgctttccctggcagattgaggtctttctcagcagcaatgactcgttcttctttccgcagctggcgcaggattttgccgccgtggcggatagcctcggctatcgccgtctgaccttgcaccgcacctttgtcccggagtcgcagccaacgacgctggcccggcgcattgcgcgcagctgccagcagcgtcaagggatcatcgtcttcggcaatgaccatcccgcggtgcacgacgcgctgcaccgctgccgggaggctggcgtcccggcgatcaccctggcgacggacctgcccggcgccgaccgactctgccacgtggggatcaatcagctacaggctggccgcacggcggggttaatgctggggagaatgacgccgcggcccggcgaggtgctgatggtcagcggccggcaagattacagcgcgcatcgcctgcgcattcaggggttccgcgaggtgctgagccagcgctttccccacctgcagctcagcgacgtgctggcgggcgaggagcggcgggagcagatcacccgcctggtggagcaagccctgtgccgcagccggaatattgttgggatctataacaccgggcttggcaatacccagattgccgaggcgctggcccgccaccgccgcgaaggcgacgtctgctggatcacccatgagcgttacaacaccacccggcagcagctggcgaagggcagcctggcgttaacgctcgatcagaacacccgccagcacgcccagctggcgatcgacctgatgctgcgccatctggagtccggctaccagccgcaaacctatgccgacggtaaagtcgactttatcctctacagcgccgagaacgtggactaaggcgtacggcgcctcccttcctgacaacacggatttccccggcgggtaaatgccaaccccgccgggagggatcgcttcaaagcgttgtctgcttctcatttttcgctcatttatgcggcaatgttagatgtctgtcaaaattctgttactgcatagttttaaaattttcatttcagttatttacttataaaagtttcaaatgtcttgttaatgaaataaatggtctgaaatccaggttgcggcgtaaatggactgatgtttcaaaatagtgatgataaaacagccgttatttgtgatttagatcacgatggagtgcgagaggtgccgcagcgtcgtcgatataccagcagacatttgtcgcaacgtaactgaaattaatttttcattttgtttcattcaccggcgtacctacaaaatcaaggatcaactatgaatattaagaaaacgattgttgcctctttgttagcctgcatgctgcctgcggtggttatggcaaaagatgtctccattggcgtctcgatggcgctgtttgacgataacttcctgacgatcctgcgtacctcgatgcaaaaagagatgaaaaaagatggcgttaaatcgcagatcgaggacgcgaaaggggatgtctcccagcagctgcagcaggtacagaactttatcggccagggggtggacgccattatcgtcaacccggtggataccaacgcggtgaaaccgatcatggatcaggccaccaaagccgggatcccgctggtgtttgtgaaccgccgtccgcaggcggagctgaccgacaagatggcctatgtgggatcggactccattctcgccggccgtctgcagatggaagcgctggcgaaagcgatgaacggtaagggcaatgtggcgatcctgctcggcgacctggcgaatgaatccactcgcgaccgcaccaaaggggtggaagaggtggtagcgaaatacccgaacatcaaaatcgtccagaagcagaccgcgaaatttacccgcaatgacgcagtggatgtggtcagcaactggatgaccagcggtgaggatatccaggccatcgcctccaacaacgatgaaatggcgatcggcgccctgcaggcgctgggcaaaaacccgaaccatattctcatcgccggcgtggatggcaccccggatgccctgcagatgctgaagagcggcaagatgatcgccaccatcttccaggatgcgaaaggccagggtgaaggcgcagtagacgcggccatcaagctggcgaacggcgagaaagtggaaaaaatcatcgacgtgccgtatcagctgatcaccaaagagaacatggctgaatttaccaaccgtaatcagaaatagtcctggccaacctgtggtacggaggtggatgtatgaacgcttttgcccttgaagccgaaggtatcagtaagttcttccccggcgtgaaggcgctcgataatgtctcattgcgcgtgcgtccgggaacggtgcatgccctgatgggcgagaacggcgccggtaaatccacgctgatgaaatgcctgatcggtatctatcgccccgataaagggtcgattcgcgtgaaaggggagccggtggagtttaccgacaccatggatgcgctgcgctcggggatctcgatgatccaccaggagctcaatctggtgccgcatatgacggtggcggagaatatctggctggggcgcgagccgatgaaatacggctttgtcgaccacggccagctgacccgccagacccaggcgctgctggataagctcaatatccgcttaaccgctgaccggctggtgggcgacctgagcatcgccgcccagcagatggtggagattgccaaagcggtttcatggaacgcggatatcgtgatcatggatgagcccacctcggcgctgaccgaaggcgaggtggctcacctgttcaccatcatccgcgacctgcgcgcccagggtaaagcgatcatctatatcagccacaaaatggatgagatctttgccatcaccgatgagatcagcgtctttcgcgacggcacctgggtagggagcaaaaacaccaccgaatttacccggcagtcgctgatcacccagatggtgggccgcgaattaacccagctgtttccgaaatttaataacaccatcggcgaagaggtgctgacggtgcgcaacctgacgcgtcagggcgtgttccatgacgtcagctttagcgtacgccgtggcgaaatcctgggcgtggccgggctggtgggcgccgggcgcagcgaggtgatggaaagcctgttcggtatggagcgcttcgacagcggcgaagtgctgatcgacggggcgccggtgaccatcgattccccctccgtggcgattgaaaaggggatggcattattaaccgaagaccggaaaaagtcgggcctgtttctggtgctgtcggtgctggaaaatatgagtatcgtcaaaatgccggaatatatcggcaagagcggttttgtccagcacgtgaaaatggccgaagactgcatggagcaaatacgccggctcaatattaaaacgccgacgatggatcaaattattaataacctcagcggggggaatcagcaaaaagtcctgattgcgcgctggctgttagcgcaaccgaaaatcttaattctcgatgagccgacccgcggtatcgacgtcggggcgaaggcggagatttatcatcttatcagtgaactggcgaatcggggggtggcggtgattatggtctcctctgaactgccggaaatccttggcatgagcgatcgggtcatggtgatgcatgaaggtcgtatcaccggcatcctggaaaaagacgaagccgaccaggaaaccattttgtcgttggcatcccattgaggcacagagaatgagtaatatgaaattaacggcggctccggccagcgagggttcctccttcttcgctaatttgcggcataaaatgccgaaagataccggcatctttgtggtgatgctggtgattgccctgacctttgaaatcgccggctggtatgttcgcgaccagtcgttcctgctcaataccaaccggctggtgctgattgtgctgcaggtggcgattatcggcatcatcgccgtgggcgtcacccaggtgatcatcaccaccgggattgacctctcctccggctcggttattgcccttgcggcggtggtggcggccagcctggcgcaaacctccgatagcctgtcgccaatgttcccggcgctggtcaacctgccggcggtgatccccatttgcgcggggatcggcgtcggcctgctgtgcggcctgaccaacggtttcctggtgacgcggaccggtatcccgccgtttatcgccaccctcgggatgatggtttcggcgcgcggtctggcgcagtattacactcagggcaacccgatcagcttcctctccgacagctttacggcgataggccagggtgcgatgccggtgattatcttcttcgtgatcgccgccgtgtttcacattgcgctgaagcatacccggtatggcaaatatgtgtatgccatcggcggcaacatgacctcggccaaagtgtccggcatcaatgtgaataaatatctggtgatcgtctacaccatcgccggggcgctctccgggctggcgggggtggtgctggcggcgcgcgtcagcagcggccagtcgagcatggggatgtcctacgagctggacgctattgccgccgcggtgatcggcggcagcagcttaatgggcggagtggggcgcattaccggcaccctgattggcgcgatgatccttggcctgatcaaaagcggttttagctttgtcggcgtcgatgcctatgtgcaggatattattaaaggcatcattatcgttgcggcggtaaccatcgatatgcgtcgcaaccggaaaaaacactaatcttatcaacgggcggcaacggcgaaggatgccgttgccgcccgtcctgtccagaaataaacaaaatactccccgccaggctccgcctgtctgttttgcccgcgctgcgcatcctgtacagtttcgccacttccgttgcccattcgtcaggggccacgcgtggcctgcggtttctggagtcgtatgaatacaccatcctttggcaaattctcgccgcgctggctagcgggaaaaaggggccttatcgtcacgctgctcgcggggctggcgatcctggcgctcggtcggggcatgaatttgccggccagagaggttttccgtgagaggcagatccgccagctggaggaggatgcgcagtgggtggcggaacgccttgagcggcggatgaacattccggcgccgcagcgggaagcgacctggccgctggcggcgatgcgcgccgctctccagaccctcgcccaggagcggcattatcagctgctgctggtgaatggcgacgggcatctgctggcggcatcgcacgcgctgccggccagcgtgctggcccaagtgcaggcgcagttcccgcgagagatgcagcccccgctgttcggcagccactaccagaccattcagccattcgccccgcatcaaaggatgttaagccgggcgctgaacggcaacgcggggctggcgggctggaatctggtgatgctggcgccggatggtggattgccctcgttgctggtggcttaccgctggccggtaacgatcggccttggcgggtgctcgccagcgcgctgctggcgctgaggcaggcggcgcgcgccaggcgaaaacgctaattgccaaccgcgccgtcagggatggcgaatctgcagggtggcgggcaggtagcgctgaagcggctccggggcctgaccgtcgatcagctggctgagcagatcgtagcagtgccaggccagctggcgattatcctgctgcacggtatcaatgcgcagggaaagcgaatcatacagatagtgatcgtcgaagctggcgagatgaatattggaatccagcagatgatgctggctcatatagcgcagcaccccttcgagcagcccgcaggccgcggtgaagagcgccttcggcggacgccccagccgcgcgcagagcgccgcgaacatctcatagccggagctggggtggtagttgccgttgatcacccactcagggcgcagcgtgatccccgcctgggccaggccctgggtgaaccccgccagccggtcgcgcgacggcgacagccgcggctggccgccgagaaaccagaactcgtccgcatgctgaggcgcgatacgggagatcagctcggccgttggggtgaccgagtcggtcatcaccagcggcagggcgctgtcgctggggaagcggtcaaacagcaccaccggcagctgttcgctgagtttctgatagtcggcatcgctgtgcatacaagaggcgactatcaggccgtcgacctggcgggcgatcatgttattgaccaccacgctctcctggcctgggttttcgtcggtgcaggagataagcagctgcacgccggcttcccggcagagcgtctcaagctcgtgggagaaaacggcaaacccgtagttggtgatctccggcaccaccagaccaatggtatggctgcggttatcgcgcagcgagcgcgcgtgaatgctcggctgatagtgctgttcgcgagcgatcgccagtacgcgctcgcgcgtctcctgcgccacgcgcagctctttaccacgaccgttgagtaccaggctggcggtcgctttggagacgcccgccagttcggcgatatctttgatagttacgcgtttggttttcatcagcacccgggagcctgaaagcaaaacgcttattctaccatgcatggccgcagcagccagcggcagaatgccaccggcgtcgcaccgctgaagatgagctgccccggatagcccgggaagaagcggctgctcatcaccccttcgccatcgttgatgaaaatctctacgctggagcggtcgataaagatccgcaggcggcgcgcctcgccgcgccagtagcggtgatgcatctccgccgtctgcaggccgcggcgcgacagacgcagaccgtcgcgattgacggtgagctgcagggcgccggcaaagtccagccccagcgtgctgttgggggcgatgtcaaaggccagctccatcggggcgaggggcagggtctgtccgcaccagccctgggcttccccgcgcagggcgaccagctcgcgcagcggacgctgatacagagtgccagcctgccactccagctcacgcacgcaggtcatctgatggatccagccctgcgcgcgggtgggctgatgcatctcgtccccgtcggggacgcccatccagccgaccagcaggcggcggccatcgtcggcctgcatggtctgcggcgcgtagaactcaaatccgctgtccagctcgtgcagcgggccgtggtcgaagatcccgcgttcggcgtcgaagcggcctgccatccacaccgccggataggtattgagaaagcgctgcgcttcgcgggccagcccctgcgggcagcagatcagcaggtgggtgtccgccagcggaaagagatccgggcactcccacatgtagccggcgttcgccaggccgttcacgtcgtgcccggcgatctcgcccaccaggcgccactcccgcaggtcgctggcggtaaacagcagcactttgccgcgctgttgcacatcctgcgccccaagaaccatgtaccagcgcccgtcctgccgccacactttagggtcgcgcacatggccggtatagccttctggcagcggcagcaccggccccagcttgcggaaggtgccatcggcattctcggtcgccagacattgccaggcggtgcgcccgccgtcggggaatttcacgttgccggtgtagcacagagtcagggcaccctcgaactcgaccgcgctgccagagtagcagccgttgcggtcatactcttcatccggcatcagggcgataggttcgtgccgccagtgcagcagatcggcagagctccagtgtccccagcacttataggtatggtcgcaggcgagcgggttccactgataaaacaggtggtaacgcccggcgacctggcaaaagccgttaggatcgttcagcagtccgttgaccggcgccagatgccattgcggataatggctgtcggccagcgcctgcggctggccctgcataacggcctgcaggatcgcaggcagacgtgacggtaatgacattattcagcgtccgttttgtatttcagcgtcagagagagcgcgaaggccacggcgaaggcgatcgccattccgataatgtagttcagcagcgagctggcctgcacgatagccatccccgggatcgccgtcaggcctaccgcggtcatgtagacgtgcatcgacaccacccaggcgccgccggcggcaccgcccaccagcgcggcgataaacggtttcacaaagcgcaggttaatcccgaagattgccgcctcggtgatccccagcatcgccgaaaacgccgacggcagggtgatggcttttattttggcatctttggttttaaaccacaccgcaaagcaggcgccgccctgggcgacgttggccatcgcccagatcggcagcaggaagttgacgccaatcgatgggttgcccagcagtccggcttcgatggcatggaagctgtgatggataccggtaatgacgatcaccgaatagaggccgccgaacagcaggcccgccagccagccggcgtggctgataagcgtgctgaggataaacgaaatgccgtcgccgagcgcgcgaccggccgggccgatcagcagcagggcgataaagccggagataatcaccgtcaggaacggagtgaggatcaggtccagcgcgtcagggatcacgcggcgcagccgcttctcgaccatgctcataaaccacaccgccagcagcaccgggaagacggtgccctggtaaccgatcatcgccacttcgatgccgaagaaattcatggtatggaagccggcggcgacgccccaggcgttggtcagcgccggatgggtgaggatcccgccgagggtcgcgcccagataggggttaccgccaaattcgcgtgcggcggtaaagccgatcaggatcggcagaatgataaacgccgccgaactgcacatatccagcatgatatagagagcgttgctcgggtcgacccaaccgtaggttttcaccatccccagcaggcccatcagcaggccggaggcgacgatggccggaataatcggcacgaagatgttggacagcaggcgggcgatgcgctggaacgggttcagctttttcgccgccaggtcggcggcttcggatttgctcgattcgctgatgcctgcggcctggataaaggcggcatagactttattgaccaccccggtgccgaagatgatctgcatctgtccggcattgcgaaagcagcctttcaccccgtcgattttgccaatcgcctgctgatcggcgagcgcgtcgtcgaccagcaccagccgcaggcgggtggcgcagtgcgcggcgctggcgatattttccttgccgcccagcaggggaagcagtgagcgggaaatctgttcaaaatccatagtaccctctaaatgcatgatgatatggcgtgggcggcgccagccgtggcaggcgccgcgaaccttatatttatgtgttatttaccctgtcgccccggtggccgtcagaaccaggtctccatttgcataccgaacgaccattcgccgcccgatttgaatccgttgctgcctaacgcgtcatcgttggcgtagttgtccagttttttgctccagtccatccacgatgtatagaagcggatctccggccgcgagaagaagtcgccgatgctgcccaccttgaaggtcggggcgaaggtcagcttgtagaagctgccattgaccgcatggcgatcgttgtagccttcaggctgcagatccatgtactgatagctgccctcccaggcgagggcgaagttctgcgtcacttcctgaatcagacgcaggttgagggtggcccactgatagctgtcgccatcgacataacgatctttactgctctgcgccagcacggccggggcaataaaccagcgatcgctcagcggcgtggtgccatagctggcgaagcgccaggtattggcccccgggcgcagcgcgccgtcggagccgatgcctttaacctcggcgcccagcccgtggccgtacagcagggccgttttgctggtcccgtcgcgcaggccatagaagctctcattgtgcaggcccagcagggcatgaaccccggtgttagcggcatcgcctttcaccagattgccgttcgcgtcctggcggtcgtcattatctttcgcccgcatcccgctgaccatcatctgcaccgggccggcaaagttattcatgctgacgatatagttctgcacgctgttgctgctgtcggcgatatcgccaaagttgcggccgtataacgagaagttgctgcgcaggctgtcgttccatttcacgtcgtagatcccgccgccggtcccggcgaggaacaccacatccgagtcaatccagtggatgtcgaagttgtcgcggtcaaagcgtttcccggcccacagggtcgagcctttgaacgggccttcgaaggtcggcaggttgcccagctcgacgaacgcctggcgcacgttcagatcgctgctgcttgccgtccagtcgttataagtggtctgtccgtcggccaccatcactttgaaacgggtggtcgccccgttgtccagggtctgtttatgttcgaggttcatttccacataggtgtcggcctggttgcccaggcgaccaatggcgccgccggtctccccggcgggggtcatataagcgccggatttggtactggcggccgagtcgttcatgatcaccccggaacgcgcatagccgtggaactcaaagccgccgggccgttcggctttttcttccagttgagtggtgcgcctggccacctgctgggtggtggcctgggtttgctgctgctgctgggttaactgctgaactttctgctccgctgaggcggcgcggctttcggcagtgctggcgcgggtctcggcgtcctgcaggcgtttttccagggcggcgagacgcgcttcaatgctgttcaggtctgtctgcccatgggcggcggcggtgccggttagcaaagcaataagaatggctaacttccgttttttatacatgttggtgacatccaaaggtaaatcagtgagtgtgctaatgtttgctaaaccggtttagttgatatggtaaacatgtcggtaacgcggtgaaaataaaaattgctaaaccggtttaagaattgtgatgtcgccagcaaagtgggccgttaaccggcccaaggggatcacagcgagcgctgaagatcgtccctgtagggcagggcggtcatggcgcctttggcggtggtggccagcgcgccgcaggtttgcgccagcgcgaggtcgggagccagggctgcgaggttgtccgggataccgtgggcggcgaggccggcgagtagcccggcgacaaaggcatcgccggcgccggtggtatcgacggccaccaccgggcgggcagggaagtggctaacctgcccgcgcagggcggcctgtacccccgctttaccctgggtcaccagcagtagcgtcggctggaagcgggcgttcagccgggcgatgccgctgacgatgtcgtcgctgccgatgataaacgccagctcctcttccgaaagttttatggcgtcggcgagggccagcgcccggtcgagacagtcgcgaaggtcctgcggatcctgccacaggtcgctgcggatattggggtcgaagctgacatagcccccggcgcgctttatcgcctccatcgccgcgaatgtcgtgctgcggctcggctccgcgctgagagcgatggagcagacgtgcagccactgaccggcggcaaacggcgggagatcctcgggctgaaggaacaggtcggcgctcggacggaccataaaggtaaaggtgcgctccccgtggctatcgagatcgaccaccaccgtggaggtgcgctgcgccgcatcgaggcgcatatagttcacatccacttgctcctgcgccagggtgtgaagcataaaacggccgaagggatcgtcgccgacgcggccgataaacccgctgtcaccgccgagccgcgccacaccgaccgccacgttggccggcgcgccgccggggcattgcagcaggcggccctctccatcgggcaggagatcgacgaccgcatcgccgagtacccagatttttccattcatacgacaagctcctctaagctaaactttattaaaccggtttagctcattaaagcacagcccaccggtaagcggaacgattgggtcacgaaacagggaggcgagggtaaaaaatgtgagccaggcggaatatttcgccactccagatctggacttttccttccccacccgcttaggtatagttcaccaggtcgcggttagccccgccgcggtggccaaaggtaaaggagtgcgtagcgcgatgaaccccagttttggcgatatttacgatcggtaccagaagctgacgctgactacgcatctgccggcggtgatcgcctgcagtgaaacgctgagtttgggcaaagaccagggctttattccgcagccgggctatctctactttctgctgcaggggcaaatgacattggcctttggcgatgagcagaacctggtcgggattgttatcgcgcatatgccgttaggattactggaacattattgtccgtcggtcgcgctctattatcagtgtctgggcgagtgccagctggcgaaaataaccgccagcgattttgagcgaatattctttcattcgtcgccgggctatatgcaagagctgaccacgatcctggcctatatgggcatatttgcccttgatgcccactatgaacgcggcagccagaccagctttcagaccattaaatcgatgctgtcgcgctatttatatcgcggcgaaattgatgggggtcagcatgagagcctgtcggcatttattattaaacgaaccaatctctcgcgcagctatgtgtaccaggtgctggccgcgctgcgcgaggggggatatatcacggtgaaaaaaggcaagctgatctccatcgaccgtcatattcctgagaaattctaaatccgattcggcagattcacgccatcacgttgctattaccgccagggaaagcgctaagcgcgctttttcccccggccccgttacgcctgaatctggctgttttatttatttaaccttgcactctggagttattttatgaccctggactatgtggcgctggccattctgatcgccgtggccttaatacttttttatggcgtgattgttattcacgatattccttatgaaatcgccaaagagcggcgtcatcctcatcaggatgcgattcattatgccggttgggtcagcttatttaccctccacgcgctgtggcccttgttatggatctgggcgacgctgtggcgcgaagaccgcggatgggggatgcgccacattgccgacgagcagcaggcgctgcatcagcgtctggaaacggtggtccagcagctggaacaggtccagcgcgaggtggacgttctgaaagcgaaggaggcaaaataatggaaacgttaatgttgctgacctacgccgcgctatgcatcgtggtgtttaaagtttttcgcatcccgctcaataagtggaccgtgccgacggcggtgctcggcggtatcgccctgattggcgcggtgatcttcgggatgaactacaacttcccttataccgacgtcggtaaccaggtgtttcgcaccgtgccgattgtgtcgcaggtacgcggccgggtgcagagcgtaccggtgaagcctaaccagatgctgcataagggcgatgtgctgtttaccctcgacccgacgccgttccaggcgaaagtggacgatctgcaggcgcagataaaagctgccagtcaggatgcgctctccttaaacgcggcgttaagccaggcgcaggccgagctgagcagagcggtggcccagcgtgaccagtcgcggcgagagtatgcccgctatcgggagggccatgcccagggcgccttctccgatcaaatggttgatacccgtctgcagacgtggaaagccgatgaagccagcgtcagcgcggctcaggcaaaggtggttcaggcgcgtaatgcgctggactcggtggtgaagggcaaaaacaccaccgtggcctccctgctggcgcagctgcaaaaggcgcagtttcagctggagaacaccgtcgtccgcgccccggaggatggctatgtcagtaccgtcggcttacggccgggcaccatgtccactgcgctggggatgatcccgctgatgacctttgtgccggtggagggcgccgcctcgcgggagtacgtcgcggcatttcgccagaacgccctgcagcgtctgcacaaaggcgagcccgcggagctgatgtttccggctatcccgggcaccgtctttcgcggagaagtggccgacgtgctgccggcgattggcgagagccagttccaggggcagggcaaactgctgaccacagacgcgctcaatacccatggccgggcgctggtggtgctgaaggtgaccgatccgcgttttgccgaatacgctctgccgcagggggccaccctcgaggcggcggtctactcggatcatctgaaagagctgtcgctgatcaggaagatcctgatccgtatgaaaagctgggaaaactatatctatctcgatcactaagccggcgggcgcggggcggacgaaccgccccgcgccgcggtcaggcctcgctgtccaccaggccgtcaataatcacctgccgcaccccctgcgaacagggttcaatacgcccgcgcaccccatagacggccgccagagtctcgggggtgatgaccgcggccggggtgccgtcgccgagcagctggcccgccttgagcatcagcacgtggtcggcgtgacgcagggcaatattgatgtcgtgcaccaccaccagggtcacgatgttgcgccgccgggtctcccggcgcaccagatccatcacgtgaaactggtagttgaggtcaagggcgctgagcggttcgtcgagcagcagcaggcgcggctggcggatcagcgactgggcgagacccaccagctgcttttgcccgccggagagctgatcgaggtagctcatcgccagatgggcaatccccagctgtcgcagcagcgccatcacttcctcctggcgctgcggactgtggcgtcctccggcggcgcgctgggcaacgataatcgactccagcacatgcagatgcacgccggcgggcagcgtctgcggaagatagaccacctgctctgcgcgacgtgagaacggctgcgtcagcagattttccccctccagcagcagctcgccgcggcaggggcccagacccgccatcgcccgcattaacgttgatttaccgctgccgtttggccccagcagcgcggtgattttccctcgcggcagatggggaaccgtcaggttctcgatcaccttgcgtctggggtagccggcgctgaagtgagacagcgacagcccggataatgtctggtcgctcatacctgcccccgatgacgtaaaatgatgctcaaaaagaacgggaccccgaccagggaagtgacgatccccaccggaataatggcccccgggatcaggtttttcgaggcgatggaggccagggagagcaccagggcgccgatcagcgcgctggcgggcaggtaaaagcgatggtcttcgccgaagagcatccgcgcaatatgcggcgccaccaggccgataaagccgattggcccgacaaaggccaccgaaagcgctgacagaatgctgatccgcagcagcgtggtcaggcgcagacggcgaacgttaatgccaaagctgatggcccggtcctcgcccaaccgcagggcggtcagcttccacgcgctgcgcagcgacaggggcatcaccagcgccagggcgaccagcaggatggcgactttgctccaggaggcgcgatcgatgctgcccatggtccagaacaccagcccctgcagcgtgtcttcgttggcgatgaactgcagcatcgagaccagagcgttaaaggtaaagaccagcgcgatgccgaacagaatgacgccggaggtggccacctgggtccagcgggtgatgccgtccagcagcagggccgccagcagggcgaagataaaggcgttggccgagataaaccactggccgggaataccgggcaggccaataccgagcacaatcgccagcgcggcgccaaacgccgcagccgaggagacgccgagggtaaacgggctggccagcgggttattgaggatggtctgcatttcggcgccggccagtcccagcgccagaccgacgataatcgccatcaccgcatagggcaggcggatatcccagacgatggcgcgcgtgcccggatcggcgctggccggatcggttaacgtctgccacaggctctgcagcggcagaccggaggggccgagcataaaatcgagcagcagcgacgcgacaatcaacagcgccagcaggaggatcagcagcagacggcgacgcacgatacggcgataatcattcatcatgccagaggtcccggcgggcagcccgtcgagcacggagtcggaggttaaacgcatgctgtatttactcgctctgctgccaggagaagacgaacggttggtccggcaggtcggtgaaatggcgcacgatataatggtacgtctcatccgggttgagatcgccgaaggcctgcgggtagatatctttcgccaggtattccatgccgacaatattccacgggtggttatagaagtggtgataaacgccataggcccgcttttcctgtaccgccgggatctggctgaccccaggccgcgccagcagcgtctgcgcctgggccttcaccgcctctggcttaaccgcataacccaggggcaacacctggctgttgccgcgcttcgagccggtcatgatccaggcgtcgggcttcatgctgatgattttctccagcgaaacgaacccggaggcgcccggcagcagctgcgaaccgatattgttcgccccgaccgcctccaccagcccgccccagccgctgtggccgtgggtaaagcagcaggcgtcgctgttgccggccagcgcttccacgaagacgttggccttcggcgtgatggtcgcggtcttctggcgaatcgactgcagctgctgacgatagtaatcggtaaaggctttggcctggctctcgcggttaaggactttgcccagcaggtcgatgctgggggcggtatctttcgccggggcgatctcatagtcgacaaacagcaccggaacgtgcagggcgctgagcttgtcgatgacgccgctctccatcagcgctggcctggcgcgcagctgggcgatcatcagatccggctgacgggcgatgacgctttcaagatcgacgttccctttatcgctgaagcccatgtcaaggatcgtggccgactggggccacgtcgttttcagcatctgccaggtggcaacatcctgctttttcgccagattattccatgccaccagccgtttaaacggattgtcccggtccagcagggcgagggtcataatgtcgcgaccatcctgcaaaataatacgctgcggctctttggcgagggtgacctgccggccgtcaaggtccgtgaccgtcaggggatattgggttgcatagctgaggaggggcgtcgcgagcagcgcagtaagtaacagcgatcttactgattttcttgccataaaatgagttccgtttgccaatttataaatataatgattctgagaattattctcgagtaaacgtcaacggcaagtatatcaagggcaaatttcataaaatgtaacaaacatgttggaaattatgccaacgccgacagggcgcgcgcggcggcagcattttctgccatggctggaggtcgaagacgtttttcaggctaattcctaatgtcatccccggttcgttgtgccatcctgaatgcgactcataacacgacacgtgagagaggatattatgaaaaaagcaatgattgcgttatcggctattctggttgcggctccggtttttgctgcgacaacacatgcaacagatgataccgtcgcggcggcgaatgccaacgccaacaccgctaaagagaagctgcatcaggcccagcacgagggcgaagagcagcagctgaaggcgaaacacgccgccgaaggcaagcaggacagcgtcggcagccaggtgagcgaaggcgcgcagaaaacctggaacaagaccaaagaaggcaccgagaaggggtgggataagaccaaagaggtcagtgaaaaaggctggaacgctaccaaatccggtgcggaaaagggctgggataaaaccaaaaccggcgccgaagaattaaaaaataaagtgactgaataagtcctttaacctgtctgaataaaggtcgcgaaagcggccttttttattgccccgccatcagcacaacctcttcccgactgccgatgccaggaatcgtcctggttaaccagttactcactctttcttcacatttgcccggtacaaaggagctgaatcaggaggtgtaccatgaaaaagatgatttctctggcagtaattttatcctgtgtgctgagcgtcccggcctttgccgatggcccgaacgacggccatcgtccggggcaacccacggtgtggcagaacggtccggaccatgacgggcatgcaccgcagggcggacctgacgcgcatcatcagggcgaccatgaccagcgtggcccggatcgcgacggccatgacaaacgcgatctggcacgtcatgagcaggaccatttcgcctggcgcgggaacgatttccgcaaaggccacccggctccggcgccgttccgtggcgatgaatatcgcgtccgcgactggagcgaccgcggcctgccgcccccgccggaaggccatcactggtcctatatcgacggtaactatgtgctgatcgccgcggcgaccgggatcatcacctcgattctggtgagcggcgccctcggccactaaatgcgctgctccgcgacgccgggtcaggaaaagcctgatccggcgatggcgcactcgcggaaagctacggatccagcgcagcatccggccagtatttataaccattgatcgttgcctgggtggacagttctttttcggtcagatgataaacgttgaccttcgaggacaacgaggcggtatctgacgccacgccgctggaagcggcggcgatcggcgcgctgcagcccgccagcgcaacgattgcgagaaggaaaagcctctgtaattgcctgcccgtttattttatataacgctggatgtggccgtgcacggtagggtaaataactggaaatcctcaaaaaaataaacttttattttttaattgcactatttttattattcattgcgctgtgatgagtgaattattaaataagatgcgtccattccaggtattagaaatgctgcttgcataaacttttcatcgcgataccgtgataagtccttaatttatttcccggagagcggcatgagtgattatgtaattccagaaattaaagcgacggaagcggaaatgatttctatccgtcattatttacatgccaatccggaattaagtcttgaagagtttaataccagcgaactggtcgccagcaagctgacggaatggggctatcaggtgacgcgcggtctcggcaagaccggcgtggtcggcagcctgagcaaaggcgattctccgcgcaccatcggtttacgcgccgatatggatgccctgccgatcgaggaaaccaccggtttaccctgggccagcacggcgccaggaaaaatgcacgcctgcggccatgacggtcacaccaccattctgctggcggcggcgaaatatatcgcctcgccggcctgtcagttcaacggcacggtgcatctgatttttcagccggcggaagaggctatcggcggcgcggatttaatgattaaagacggcctgttcgagcagttcccctgcgaacgcatctttggcttgcacaacatgccaggcctgcctgtaggcaagctgggcttctacgccggcaacttcatggcctcggcggacaccgtcaaaatcacgattaccggctacggcggccacggcgcccaccccgagcgcaccgtcgacccgatcgtcgccggtgcggcgctggtgatggccctgcagagcattgtggcgcgcaacgtgccgccgggggaaacggcagtggtcagcgtcggcaccttccaggccggtatcgcctccaacgtcattccggagagcgcggtgatggagctgagcgtgcgggcgatgaagcaggaaatccgcgacctgctgatcaagcgtattcacgagctcgctgactttaccgccaaaagctatggcgccagcagcgtagtggaggtttacgactcctatccggtattaaccaacagtcctgaagagaccgatttcgcccgggcgctggcgctggaggtgtttggccgcgaaggggtcctggagtcggtctcgccgatgaacgccagcgaggatttcgcttttatgctgcgcgaacgcccgggcagctacttcctgctcggcaatggcgagaaaggggagaagggcggttgcatggtgcacaaccccggctacgactttaacgatgacattatcaccatcggcgcgacgctgttcgcccgtctggtggaaaaacactgtcgctaatctctggagaagaacgcgaatgaaaaaatcactgttgctatggctggcattaatggcgtcgacgtcggcgctggccgaagggggaaaggagatccgcttcggcgtcgacccgactttcgcgccgtttgaatggaaagatccgcagggcaagctggcggggtttgatatcgatttaggcaacgccatttgtcagcagctgcaggcgaaatgcgtgtgggtggaaagcaatttcgacggcattatcccggcgctgaaggcgcgtaaattcgacgcgatcctttccgggatgtatatgaccgagaagcgcaaagcgcagattgcctttagcgacaagttgtataacgggccggtgttcctcgtggcgcgtaaaaataccctgcaaggcaatacgccggaacagctgaagggcaaaaccatcggcgtggagcagggctcggcgcaggagacgtatgttaaccagcactggcggccgcaggggataaacattgtggcctaccagggggccgatagcgtggtgcgtgacctggagtcggggcgcatcgacggcgcggtgctctccgggatgatggccgactacagcttcctgcagcagccgcagggtaaagaattcgcctttgtcggcggccatctgcaggacgatacgctgtttggcgccggggcggcgataggtttgcgtaaagacgatgaggcgctgcgtcaggaaattaacggcgcgattgcgaagattcttgccgacggcacctataaaaaattagctggcaaatattttagctttgatgtttattccgggacataatgtcagagtgtacctgcgtgcgtggagcgcccgccgtaagattccttttctgattatccaatcgacctcctctcctgacccctgtggttacctgagggaagcagaatataagctaaggagtactcggcatgatgacacgtcctttgggcaaaaccggattttccatcgccccattagtctttggcggcaacgtctttggctggaccatcgatgaaaaaaccagttttgctcttcttgatgctttcgttgaccacggttttgacgctatcgatacggcggatgtttattcccgctgggcggagggcaaccagggcggcgaatctgaaaccataatcggccgctggctacaggcgcgccccggcatgcgcgataaagtcaaaattttcaccaaagtcggctccgatctcggcctccccggccataaagggctcagcaaagcctggatccaacaggcggttgacgactctctgcgtcgcctgaataccgattatatcgacctctatttctcccactggccggatccgcaaaccccggtggcggaaacgctggaggccttccacagcctgcagcaggccggaaaaatccgcgcgatgggggcctctaacctcgatgcgatgcagctggcgggggcgctggaggtggcgcgtaagggcggcttgcctgcgtggcaggtgctgcagccggaatataacctctaccaccgctctgcgtttgaaggcgcgctgtgcgatctctgcgtcagccgcgatatcggggtggtgacctactacagcctggcctcggggttcttaaccggtaagtaccgccagccgtcggatctgacacagagtcagcgcggaagcgggattggtaagtacctgaatccgcgcgggatgcggattatcgataccctggcggcggtcgcggacgagcagggcgcgaagccggctgaggttgccctggcgtggctgatcggccgcgaaggggtgaccgcgccgatcgccagcgccaccagcgtggctcaggtggagagttttgcccgcgcggcggcgctgagcctgagcgcggagcaagtggcgcggctggacggcgccagcgcctgaggcaatccctcttcccggcggggagaggggggaaggctatacatgacgcggagcgtaggccgggtaaggcgccagccgccacccggcaaaataacggcgcaaccggaaatgtccctgcccgcgctgcgcttagcagggctacagcttctatgttacttccgggccgattgcgctcccggttaattgtctgcgttatggcagtcatggtgcagggagcgcacagggggcggccagtcgccgccgccccctgtacccccgggctccggccagcaacatcgccgctgcgcggtgccttcgacttatccctgcaggcttcgggtcgggccgaggcagcgtccgtgcaaaacacggccctcagcccgcatccatgcgggctgccccggccttccgggaacgtctcagcgatgttgaggccgcaacaccggcagtttcagcaagactggtgaataaattaacgacaggttgcgcgaatcgtaggccgggtaaggcgccagccgccacccggcaataaagcggctctgtgcctgatagcatcgcccggtggcgctgcgcttaccgggcctgcgaggtgtgagcctgtgagaggccccggtaggccgggtaaggcgcagccgccacccggcgaaatgacgggtgcggtgcctgaaagcgtgcccggcggcgccctactattcctgatggcgggtgacgttgaggatcttcgcgctggcgccgaccggaaaattgctgagggcgccgaaatcgctgccctgatagcccatgatcttgccgtcagtgcgcatctgctgcagatcgatgaggatcacccccagcgtgggaatgattttctcccgccagacgaacagatagagatcctcagccacctgcacatagtggcagcgatcgacatccgccagccccttttccacgccgtccagacactgccaggcgtaaaaattatcgttgagatagatgtgctcatagcgctcggtcgggctataggtgtactgattgcgcatgccaatgagcgcatcggtaaagcccggcaacggccccggctgggcatccaggcgggcgaagacgaaacgggcctcaaccgcggtcagcggcaacccttgttctacccggctgaaggcgtccagccgcgcggcggcttcgtccggcagctggccgtataccagcgtggcattgcgctgcgtcaggttgcataccgcgctaatgctggcgttatcccgctccgggtcaaggaagtcgataaacagaatgtccgggcgcagggcggtcgcccgccagggggcgcgcttgccgttccagcttagcgtctgctcatcttcgataaccagctgctgcggctcgctcccggcgacataaaaggtaaagttttcgccggcgggcaggctggcggtagccagcaggttaccgtgcggcgcaaaaccatcggccagcgcgccgacctggataaatacggcttctgaagtcataggggctcctgaacagagtagggcgttaggcaaacgccagagtgggaacatcgacgatactggccccgccgtcggcgaccagcgtagcgccgctgatgatggcggcctgcggcgaacagagaaactgactggcctgggctatctcctcggggctggcggggcggcgcagcggaacgtcacgacagacccgctgataagcctcagtcagcgacagcccttccgcctgcatcagcgggcgcatctcttcatccgccatcggcgtcgtgacccagccgggacagacggcgttagcgcgtaccccctgggggccataatcgcgggcgacggagcgcatcaggccgattaaagcgtgtttggcggtgacgtagccgcaggcctgcggcccggcggccagagaggcgatggaggcgacaaacagcacattgccgcggcgggcaatcagcgaaggcagacaggcgcgaacgctggcgaaggcgctggttagattgccgtccagcgcctcgcgccattggcggtcgctggtctcggcggcggggctgttgcccatcccgccggcgctgcagatgaggacatcaatcccgccggtctggtcgaggatggccggcagcagccgctggcgccacacctcgccgtcggcggcatcgcccaccagcgccgtggcgccggtctcatcagcgacagcctgcagcggcgcttcgcgccgtccggtaataaacacccggtcgcccgcggcgcgcatcagccgcgggcaggcggcgccaattccggttccaccgccggttatcaccacgactctcgccatccgcactctcctgtaatggggtttccgattaccttaaaaagcgcgtcaggtcccggctatcgcccggaagaacgatagccgtggcggttaatggatctcgctcacagggatcgcctgcggcgcaggcaccggcttcatggtggcggggtcgaccgccagatagcgcccggttttgctatcgataccgacgtagtcgatcattttgccctgcgctttggtaaccatggtgcgcttagcaaatgcctcgtaggcctcgctcatggctttgacccgatcgggatgttcggccgcgacatcatgcgtctccagcgggtcgtcgtgcagattaaacagctgccacggcgcgtcgccggcggtgaggccgcgcggcaccagccgtcgcagcttccattcgccatcgacccaggccgcctgatgatgcagttcaaccccgtagttgccgcgcggcggctcctgtacttcgccggtgagatagcgcttaaagctgacgccgatcatcggcaacaccgacttcttcgccagcgacttgttcggatcgatgccggcgaactcatatagcgtcggcgccacgtcatacaccgccatcgtcgaggcgtcgattttaccgtggcgggtgatcccgggaccggagatcataaagtcggtattgatgccgccctgggcgctggtggttttgtgataattggcgtagggggcgttgctgacgttggcccagtgggggccgtaggagacaaatgatcctttgcggccgacgttgtcatagctgttatcgaactgcttccagaattccggggtagattcgtagtagaaaccctgcgccgggttggcgccgttatcggttaaaaagaccagcagggtatttttatcgcgcccggtttgtttcagcgtctccatcagggtgccgatttgcgcgtccatattggcgatcatcgccgcatatacctgcatcacttttgccgtatatttctgctgctctggcgttagtgcctcccactctttatccagctccagatgcggcagcggggtatcgtcatggataattcccagcgctttcaggcgggcgatgcgctggcgatagacctcggcgtaaccctgctcatactggcctttgaagcgcttaatccactcgtccggcgcctgcaggggatcatgaggggcggtgaaggccagccaggcgaagaccggctgttccttcggcgtcgctttaatccagctgttcatctggcgggcgtaggcttcgctggagtaaaaatcatccggtagggagacgcgctcgccgtcgcgggtgtagtaggtgtggaaggcttcaacggtccccagcggtatcgcgtcgttaaagtggctggtgccgccgcccataaaggcgaaggcgtgattaaagccgcgatctttcggcgtggcgccgggaacaaaaccgaggtgccatttaccggccatcagggtgttataccccgcgtctttaaagcgctcggccatggtggtgacgcggtcggtcagccgcagctcgtagccctccttgccaatggtgctgtcgtaccaccacatgccgcccatcccagcctgctggttactgttgccggtgagcagcattgagcgcgccggggccgacatcggcgaggtgtaatactggctcatgcgcattccctgctcggccatcgcctgcaggttgggggtggggatctcgccgccaaaggggctgatgtccgagtagcccatatcatcggcgataatcacgatgacgtttggacgctcctgctgcgcggcgtgcgcgccaccggcgaggatcatgctgaccgccgcggccatggcttttttgttcacgactgactctcctgttcagagggggatatcatcagggtaaggcgctacgcagtatgcgcagtcccaacaaacgcggcccgccaggccttcaggccattcaggtcgcgggaaaaggggcgtactggcgcgaggatgtcgctaaagaagcggtagtagccgccgcagaggcggttgttgcctgcggcgttgagatgcgccgggcagccgccctggcagaccatttttaccgagcaagtctggcattcgcggcgcagacttttctgctgaccgaacggcagttgcaccgaggcgtcgaccgcggcggcgagcgtctgctcatcgaggcggcccagccgatgttcggcgttgatcaggtggtcgcaggcgtagagctgtccgtcgggctccatcaccaggttgctgccgcagcgggcgctgtgcacgcagctgccgctggtatgagtgaaatactgcgcccacgcctgttcgatattgataacgaacacccgccccctatcgcagcgcttccgccactgtcgccagatgccgaccataaaacgtccccagttatcggcgctgagctggtatccttcgcgcagggccgcgccttcgctcatcagcggctgaaactgcagatagcgcgcgccgaggctgaccagccggtcataaatcgccgccgcgtgggccgccatctcgttatgcaccaccaccagcagattaaagtccacctgatgctgatggagcaggtcaatgccgcgcagcgccgccgaccaggtcgaccggccgcgtttatccggacgatggtagtcctgcagcgcttcgttgccttcgaggctcaacccgataataaagccatgttcgcggaacagtcggcaccatgggtcgttgatcagcgtcccgttggtctgcaggctgttgctgatagtcacgccgtcgggggcatagcgcgcctgcagggcgagcgcttttttgtagaagctcaggccggccagcagcggctcgcccccctgccagacaaagttgatttcccgcgcgccggcgggctgggcggcaatatagcggcggataaactgctccagccgcgcgtcatccatcttgttgaccggcgtttcgtcctgcgggtaatagcaatagcggcaggcgagattgcaggcggggccaatcggcttcatcagaatatgaaacggcaccggcgagcgcggctcagcggccagcggaatttgctgctggcgcagggcggcgatattcagcatcggcttatcctcggttaatgaccggtactgttgatattattttggcaacagcgggtcaggcgtaatcacatgattaagccgcggcgaaaattaattgcatcctgataagggtataagtgaaaaaaaacaaaaatccatcgttctttaggatgagaatcacgcgtcgggaatagggtttttttatcaccaggggcaggtacgccgggtgttaatcttatttgtttatgttttaacgccgctatcgtaaagcatggccggggtgttttttaaatgctttatataacaatgtattgctgaaaattttgtaacggctatcacattgttaatatgttaatgattgtgttacttaaatgtgaaatgtatgcttcagttatcagtagtcatccatgtgtcatgtaccatcatctcgacggggaggccctatcatgtctgctttgttaaaagccagccgtaatgatgcgataatagcccgttgtttacagactatttcccagttaattccactaacttcagcggtgttttatcgagtaaataatcgtttaaaacccgaaaactatatattgcataatatttccgataatacgcaccaacaatatctggaaaacttccagccgctggatccgcttctgccgtcgcactttagccaccagaacaccaccgtggcggcgatgacgccgcggctctgcgaccgcaaccggcattactatcatgaatttatgttgccgaataacgtgcgcgacatgaccgagatctttatccgccgcgagcggcggatcgtcgccggtatctcgctgatgcgcgacgtgcctttctccagcgaagagcgccagcgggcccaggcggtgctgccgctggtagagctggccattcgcgactgcctgcaggaagaagatgatctgcccgccatcctgacggcgaaagagcgggaaatcgtcggcatggtgcgcgaaggcgccagcaataagctgattgcccgccagctggatatctcgctctcgacggtaaaaacgcacctgcgcaatattttcgccaagaccgaagtggtcaatcgtaccgaactggtttcccgaacctggatgccggccgctcagcgtacgctgcatctgtaatctgactttcgcatcccgcgcgcgccgtggcagcacggcgttttcctgatgcctgtgggtatcactccctggaggatcccccggggggaggcttttttgaccggagcacgccctacgatgtcgagtacacctctcactgataatgcgctttcccggcccgccgggctggtggtgtccctgcgtttgctggcggcgatcgtgatttttgccgctattgcgccgggtattctgatgaccgcgccggcggtggcggcgcagctggccagcgaatggcagctaaaacccgggcagatcggctggctgttctcagcggagctgggggcgatgagcctggcgacgctcccggcgtggtggtggatgagccgcctcgactggcggcgggttgccctgacggccggggtggtgtttctggccgccaacctcgcctcggcggtggtcacccagtatgagacgctgctggcggcgcgctttatcgcctcgctggcgggcggcacgttgatgattttgtgcatcagctgcgcggccggaacgccgaacccgtcgcgggtctacgccttctgggtgctcgggcaactgctgttagggatgcttggcctgctggcgctgcccggcctgttcgcgacctttggcctgaaggtggtgtatctgatcctcgccgccatcatgctctgctgtttgccgctggtatccgctttccctccgcgctttcaaccgctttcagtctcccgccagcagccgtcgacggcgctgtggcgtcaggcgctggcggtgctggcggtgctcactttctatatcagccttagcgccgtgtggacctttatcggcaccatcggcagcgcggcggggctgagcccgacgcaggtcggtctggtgctggcggcggcgacggtttgcggcattatcggcgccggcggcgcggccctgcgcggcacccggcgggccgatcgtttaccggtgtggctgggctacggcctgttgatcgtcagcgttgggctgctgatcggccagccgctgctggtgcgttacgccatcgcggcgctgctgtttaagttcacctggaccttcgtgctgccctttattctcgcccgcgtggccgggctcgataacagcggtcggctgatgaacagcatcaatctggtgatcggcggcggcatggcggctggcccggcgcttgcgggggccttactgcaacacttcgccagcgccgacccgctgctggcggcggcaggcgtctgcgcgctgctgtcactgattttaattgtggcggcatccgccgccgggaaggcttagcccacgggaggatagagtgaaaagaaaaaccggtttcttttttgatgaacgttgtttctggcacagtaccggtctgcacgcggtgacgctgccggtgggcgggtgggtacagccgcccgccggcggcggtcatgctgaatcgccagagaccaaacggcggatgaaaaacctgatggatgtctccgggctgacgccgcagctggcgctgcgcagcgcggcgccggcgagccttgaggacctgcggcggatccaccccgacagctatctggagcgcttcaaggcgataagcgataacggcggcggcatgctcggcaaagaggcgccgctggggccgggcagttatgaaatcgcctgtctttccgccgggctggcctgtgcggcggtggaagcggtgctgaagggggagctggataacgcctattcgctgtcgcgcccgcccggacaccactgcctgccggaccagtcgatgggattttgtttcctcgccaatattcccattgccgtcgagcgagcgaaagcgcagctggggctgggcaaggtggcgatcattgactgggatgttcaccacggtaacggcacccagcatatctacctgcagcgcgacgacgtactaactatctccttgcatcaggacggctgcttcccgccgggctacgccggcgaggacgatcgcggcgtgggcgcgggcgaaggttacaacatcaatattccgctgttggccggggcgggggatgacagctggcgctatgcgctggaaactatcgttattccggcgctggcgcgttttgagccggagctgatcatcatcgcctgcggctatgacgccaacgccatggatccattagcgcggatgcagctgcacagcgatagcttccgggcgatgaccgaacaggtccagcaggcggcggatcgcctgtgcggcgggaaactggtaatggtgcacgagggcggctacgccgaatcctacgtgccgttctgcggcctggcggtgatggaagccctgagcggcatccgcaccgaggtccaggatccgctgctggaatttattcaacagcagcagccgcgcgccacgttcgcgcagttccagcgccaggccatcgatcggctggcgcagcagtttggtttgctataaaccacctcagcttccccgcggtgatggcggggaagtcaatgctttctcttctgcgatttcaccgcgcatccactgacttaccgcctgattaatcatcgccagcacgctgagcagcagcatccgctgctgggcttccagccgcagataacggcgcagcggcggcattttacagaccacttcgctggcggcccagggttcaatgccgcagcgccagccgctatcgtcaaaggtcaacgaaaagcggcggtagtccagctcgcttaaggtctgctggagattaggaaaaccgttgagatagccagcgagttccgcgctctctttattgccgataaagcggattggcaggcgttttagccagccggattggtgggcgcggatcttgccgcgagcgggccgggtcaccggcccctcgacgacaaactcgcagctgtgaatgctggccataaacagccgcttctgacgcacgctgaaggtgacggcgatggcgtcgttcaagcgcagcagcgcgctgcgttcgctcagcttttcgctgggccagcccgccagatcgcgctgcaccgcgttcattaacggcgtttcaaaccaggggacggaggacatctggcgtcatctccccgcgggtctgtttttcataattgttgatggcgcgctccaccacctcttccactaccagcggcttgaacggattgacgcgctgcacgcacaccgtccagaacagggcgtaagcggcggtcaggccgagcattatgccgaacggcaccagcacctggcggctgtccatcccgggcggcgtgatattgacgatagcgatgatgatcccgacgctggagataatctgcggcagcgggaaccacggcgagcggtaggcgcgcggcagatccgggcggcgaatgcgcagcatcaccaccgacagagtaaccagcagataggcgacgccccaggcgcagaccgcggcgaggatcagcggcacgatgcggtccagatcgccgttcagataccaggcgtgcaggcaggggatcgccaccccgatggcaatggcgatcaccggcgtcttaaagcgcggatgcagccaggtcaggaaacggggcagcgcgccgtccagcgccatgccgtagataatacgcggcacggcggccatcagcgtattgatggtggcgcagccggccaacagtagcccgacccccagccagtactggccggcgtggcccatcacccgttcggcgaaggccgggatcgccatcggtgtatccagcagatggacgttgttggccgcgtcgagcacggtattctccacctggcggttgatcgccgcgccgtagataaacatgcagctggcgacccccagcaggcccagcgccatcgcccgcggtatggtgcggtgggcctgtttgatctccggtgccatcggcgtcaccagttcgcaaccgacgaacataaacatcgccatgccgatatagccgaacaggccgttgatatcgctaacgttcagcggcgtgccgaaccagccggacagatgggtgaccggcgccataaaaatgccgcacaggccgaaaatggtcagcgtggtccacatgccgaaggtcagcaccacttcgaccttgccgaagatttccacgccgatggcgttgagcaagccgaaaatcaccaccatgccgacgcccaccatccaggtattctggtgagcggccatctgggcgttaatcgactcgaagttcaccagcgccataatgcccgccaggatcgtctccgccgtcccggcgaagatatggacgatcagataggcgcacagcgcgccggtgatagcgaagaagcggcccatgccgcaggagatatagtcgtacaccgaaccggtggtgggaatgagcgtcgccgcctcggcaaaggtggtgacctgcgcctgcatcataataaaggccagcagcaccgccagcgcgaaggtatcgccgcccatgccgaagccgctggtgaccgtcaggatcaccgggctggccatgatcagcccgacggagctggcgagggtggtcgggaagccgacgacgccgcgctcaagatggctggcgagtctgttactaaacatagtcaacctctgcacaataatggggtagcagggaatagccagcgccactcccggatagtcataatttaggcgggcatcctgctcaacgaatatcgtccggaaggtggagggcggcgcatgattctgtgacgcagtcgatgaatgtcgcggcggataaacaatatgaccccgaaaaccggggccatccgtcttgccacgttgcgcctgtttctgccggatggcggctgcgccttatccggcctacggtccgtgcggcctgcctttaatttggcctcaaaccccccggtggcgctgccgcttaccggggctacagcgctgcgcgatttggtagcccggagaaggcgtaatgcgccgccgggcattatcagtttgttagcgggtctcgacgttcgccaggtagtgcttcacaaagcgcggcgtcagaattttccactccacttcggtgccctgtttaacaaaccagctgtcgcccggcgcaaagcgctgcggctcgccgccggcgacggtcagctccacttcgccctccagcacggtggcgtgctcggtaaacggataggtcatggtaaagctcccctcagtggacgaaaacagtccgcaggtaaaggcgtcctgcggctcgccgtagatcatcgcgcccgctacctgcgggtcgccggcggtcggcgtcgcgccgagcaggctgacgctgccgatcggctgcagatcaggtaccgggtgtttaagtttaaaagcgtgcatagcgttctcctggttaactccggcctttccagaaaccggcggtttgatgcatcagttttccggccgtgactaatagcaagcgcagactgtcacgaccgtggatggtcgcgtgggggatgctgctcagcaggcgatagcggtcggaaccgccgtcgatcccttcggcgaggattttgcacacgatgtgcgacggggtgacgccgaagccggagtacccctggacgtaaaagacgttgttgtgatcgcgtagggtgccgatctgcgggaacagattggcgctacaggccatcggcccgccccaggcgaaatcgatcttcacatccctgagataggggaagacctccgccagcaaggtgcgattccaggcggcgaaatcgttcggcgtatactccacaaagcgggtggcgctgccgaacagcaggcggttttcccgggtgacgcggtagtagttaattaccgggcgaatatcgctgaaggcgccgcgcagcgggctgatgcgctcgatcagttcatcggagagcggctcggtcgacacctggtaggagtaagtgaccagcgtcttgttgtagatctccggctccatattgttgaggaaactgtcgcaggcccacagcagtttggcggctttgacgctgcccatcgcggtgcgtacccgcacctgtttgccgtaattcacctccaccaccggcgaggattcgaaaatcttgacccccagcgagtgggcggcctgcgccgaaccgagcagcatattgagtgaatggatctggccgccgcccatatgtttcagcgcgccgcagtagacctcggagcccaccacctgctgcacctcttttccggtatacagttcgatctcttcatccggggtagcggctttaaactccttctcccactggcgcagcgttttaagctgtcgctggttataggcgagatagccgtagccgggcacgaaatcggcgtcgatgttgtatttgcggatgcgttcgcgaatgatgcccgcgccgaggttggcgattttaaacagcgtctccagcccctctttgccgacgtgcttttttaccgcttcgatatcgtggccgataccggccatcacctggccgccgttgcgcccggtgccgccgtagccgagatggcgcgcctccagcaccaccacgttggtgatcccctgttccgccagctcaagggcggtgttaatgccagagaagccgccgccgataattaccacatcggcttcaatatcttcccgtagcgccgggaaatggaggtgatatttcttcgtcgcgccgtagtagttcagcgcatcgatcttgatgttcatcgcgttaccctgtggtcttgcctggctcaagaccctcatcacagcacgccgcgcgggcgttgaatatcgtccggaagaatgacgttctttagaacgataggctgcggcgggaagccgtgctgtgatgggttaactttgctgaaaaacgggtgctgacgatgagcgagataaccttactggcggaagtgaccgccttcttacgccagccgcacgggcagtttattgccggtcaacgtgaggcgggccgcggcgcgccgttcgcggtgatcaacccggcgaccgggcgggcgattgccgaggtcaccgcggcggatagtgaccaggcggatcgcgctatggagagcgcccgccaggcgtttagtcagtggcgcgagatgccgacgctggcgcgcggcgcgctgctgctgaagctggcggacacgctggcagagcatcgcgaagcgctggcgcagctggaaagtctctgttccggcaaaactatcacgctggcgcggatgctcgagctggaccagtcggtggcgttcctgcgctacttcgccggctgggcggggaaagtcaccggtgaaacgctggatgtctcgctgccatcgatggccggggagaaatataccgcctttacccgccgccagccgctgggggtggtggttggcatcgtgccgtggaacttctccatcatgattgccatctggaagctggcggcggccctggtctgcggctgcaccatcgtcctcaagccgagcgaatatacgccgctgacgctgctgcgcgtggcggagctggcaaaagcggtgggtatcccggatggggtgattaacgtggtcaacggcgccggcggcgagattgcccaacggctgattacgcatccggcctgcgccaaggtgagcttcaccggctcggtggccaccggtgaaaaagtccagcagtcggccagtgcgtcaggtaaacgggtgacccttgagctggggggcaaaaacgccgcgctgttcctcgatgacctgacgccggaggcgatggtcaacggcattattgaagctggctacctgaaccaggggcagatttgcgccgctgcggaacgtttttatctgccgcagggaaaactggatgcggtactggcgctgctgaaagacaagctcagcgcttttgcgccggggtcgccgctggatgaacggacgctgatggggccgctggccaaccgccagcagtatgacaaagttttgcggctcattcagaccgcccgcgacgagggcgataccatcgtctgcggcggcgaagcgctgccgggggagggctatttcctgcagccgaccgcggttaaagtgcgcagcgaagagagtactctgatgcgcgaggagaccttcggcccggtatgcagctttatcggctatcgcagcgaagaagaggcgctggcacgaattaatgcttcgccgtatggactggcggccagcgtctggtcggataatattcgtcaggcgctacgctactcggaggcgattgaggccggcatcgtatgggtcaatatgcataccttcctcgacccggcggtaccgttcggcggcatgaagggctcgggcatcgggcgcgaattcggcagcgcgtttatcgatgattatacggagctgaagtcggtgatggtgcgatattaatcgccgttcagcgacatagcgctgtcatgtgtcgctttgcgccagataggcaacacattgtgtgccttctggcccgcaacccgggcggtgcacggcatcgcttccgggacgcttttcccgtcacggatcctttcttcccctcctaatccgccattgccgtaaaaaaaatcagcagattatcttttttgcccgccaggacttgtttgacattagataatgagtatagttctcattctctttttcattcgtaattttggcaaggttcgagctgcgccagtgagtcgttcactaagagtcgcgaaggcgtagggtgacgtaaagacagcaggctggaaacacacaatatcggccgctgcgcgtccatcgggtcattgattttttatagggttgatccaatgaaatacacacttccggcgttgacgctggccatcagcgcggcgttaagcggctgcgcgacgcctcattcctctgccgtttcccaaccggttgtcgactcgccagtccctaacgtggcgcaaccgctgcagcgccagctagcggaagggctgtacgagatggcgttaagcccgcagggtgatgcgctgtacgtcgccagcgctgaaggctttaaaaatgtacagggcggggcggtttacacactggatccgcacaccctcaataccatcggcctgacgcataccgatctgaaaaacttcgctttacagctctctgcggagggtaaaacgctgtatgtcagcaattcgctggacggcggcatcagcgctatcgacaccgccaccggcaaggtaaaaaaccgcctgctgttcagcgagcgcaatgaaaaaggtcgcccttatggggcccgtcagctgctgttgctgaataatactctctacgttggcgcggtcgccgacccggcgcaaatctgggtggttgacgccactaccctgaagctgaaaacgcggattaaaaataccggtaaatggatgaccggcctgcactactccgcgcaaaccggtcgcgtgtacgccgctaacggcagcggtgaaattctggtgatcaacccgcgtaaccaacgcattgaacagcgctggaagccgctgggcgacaagccggcgctgctgcttaatatggccgaagatagcgacaccggccgtctgttcgtgaccgacaactcgaaagcgaaaaccactctggtgctggatatccacagcggcaagctgcttaaacagctcgacgtcggcgattcgctggcggtgcagttcaataagaaacgccacgaaatttatatttcacagcgtgaatccggcaaggtcatcagccttgacgccagccgctacacgctgaagaaaagctgggcgctgccggccaatcccaacagcctgctgctttccgccgatggtcagacgctgtttgtcaccgtcaaacagcccttcaataaagaccactccactaaaggcccggacagcgtcgtacgtatcgacctgaacgcgcaataaaaataacgggtccggcgacgggccctttgattcatttatcctcatccatggggcaaattatgcacaccacgcactattcatccttcccgctgcgtaaaacgctgctggccttagccatcggcgccgccagtcaaacggcgatggccgcggacgctgccgccgcgaagcagcctggcgaagagaccctcatcgtcgaggctaacgaaaccagcgattttaaatccggcggcgacctggtggttccggcattcctcgatggccagatcgcccacggcggccgtctggggatgcttggcgaacaaaaagcgatggacgtcccgtttaacgtcatcggctatacctcgaagctgattcaggatcagcaggcgaaaactatcgccgatgtcgtcagtaacgacgctggcgtgcaggccgtacagggctacggcaacttcgccgagacctatcgaatccgcgggtttaagctcgatggcgatgacatgacgatgggcggcctggcgggcgtggtgccgcgtcaggtgatggacacccagatgctggagcgcgttgaaattttcaaaggggctaacagcctgcttaacggcgcggccagcagcggcgtcggcgggatgattaacctcgagccgaagcgggcggaagatctgccgaccgcacgcgttggcgtcgactatacctctgattctcaggtgggcggcaccctcgacctggggcgccgtttcggcgacaacaaccagttcggcgcccgggtcaacctggtgcaccgcgagggtgaaggcgctatcgataatgataaacgccgtaccacgctggcttcgctggggcttgattaccgcggcgaccgtttccgctcctcgctcgatttcggctatcagaagaaaacgttccacggcggtacgatgggcgtcaatatcagcggcgtggatttcattccggcgctgccggacaacagcaaaaactacagccagaagtggggctatagcgatattgaaagcgagttcggcatggcgaaggcagaatatgacctgaccgatagctggacggtatacagcgccctcggcggccagcattcgcatgaaattggtacctacagcgcgccgaagcttctgaataaaaacggcgatgcgacggtgggccgcctggatactaaccgcattatcgacgcgatcagcggcatgggcggggtacgcggcgatttcaataccggcgcgatttcgcataaggtgaacctcggctatgcggcgcaggtgcataccgatgcgaccgcctggcggatgtcggccaggaacccgaccactaatatctatgacaaccatgatgtggcgatgccggataacgcctattttggcggcaactaccacgatccgctggtcacctcgcgcagccgtacgcagggctggctgctgagtgataccctcggcttctttaacgataaagtgctgtttaccgccgctgctcgtcatcagaaagtggttgtgcgcaactacagcaacgccaccgggctggaagatacctcttcgcgttatacccaaagccgctggatgccgacgtttggcctggtgtacaagccgtgggagcagctgtcgctgtatgctaaccataccgaagcgctgcagccgggctctgtggcgccgacgacggcggccaatgccgggcagagtaccgggatcgcgcactcgaagcaggacgaagtgggcgtcaagatcgactacggtacgatcggaggatcgctggcgctgtttgaaatcaaaaaaccgaacgccatttccgataccgctggcaattacggcctcgacggcgagcagcgtaaccgcggcgtagagatgaacgtctttggcgagccgatgctgggactgcgtcttaacgccagtaccgtctggctggatgccaaacagactaaaaccgctgaaggcgcaaccgacggtaaagatgccatcggggtggctaacttctacgcggtactcggcgccgaatatgacatcaagccggtggaaggcctgaccgccaccgcgcgcgtcaatcatagcggctcgcagtatgccgatgcggccaataccaagaagctggatagctacaccaccctggatttaggcctgcgctatcgtatgcgtctgaacgccgaccagaacgaaatgatctggcgcgtcggggtgaccaacgtgaccaacgagaagtactggtctggcattgacgataccggtacttacctgttcgaaggcgatccgcgtaccgtccgcgtctcaatgagctacgacttctgacgctaaaaaaagcggggcgggcggctgacgctcgccccacgcaacttgcgacaatcccccctaagtgataaaaggtgccccttcacaaaaacacacaggggaacgacgtgaaagacgcgtcaacgtcgtcggagaccgtcacggaaagtggcccgacgcttcatcgcggtttacagaaccgacacattcaacttatcgcccttggcggcgccattggcaccggcctgtttctcggcattggtcccgctatccagatggccggtccggcggtcttactgggctacgccgtggccgggattgtcgcttttctgatcatgcgtcagctgggcgaaatggtggtggaagagccagtatccggttcctttgcccactttgcctataaatactgggggccgttcgccggctttctctccggctggaactactgggtgatgttcgtgctggtagggatggcggagctgaccgccgccgggatctatatgcagtactggcttcccgacgtgcccacctgggtttgggcggcggctttcttcatcattattaacgccgtcaacctggtcaacgtacgcttgtatggcgaagcggagttctggttcgcgctgatcaaggtgctggcgattatcggcatgattgccttcggcctgtggatgctgttcggcggccacggcggcagcaaagccgggttcgacaatctgtggaaacacggcggcttcctcgccaccggctggcacggacttattctgtcgctggcggtgatcatgttctccttcggcgggctggagcttatcggcatcaccgccgccgaagcgcaaaacccggaaaagagcattcccaaagcagtcaatcaggtggtctatcgtatcctgctgttctatatcggttcgctggtggtgctgctggcgctctacccgtgggtggagatcaaatccgacagcagcccgtttgtgatgattttccataatctggacagcaacctggtggcctccgcgctgaacttcgtcattctggtggcctcgctgtcggtgtataacagcggcgtgtactccaacagccggatgctgttcggcctgtcggtgcagggtaatgcgccgaaatttctcgcccgcgtcagcaagcgcggcgtgccggtgaactccctgctgctctccggaattatcacttcgctggtggtggtgctgaactacctgctgccgcatgaagcgctggggctgctgatggccctggtggtggcgacgttgctgctgaactggatcatgatctgtatggcgcaccttaagttccgcgccgcccagcgccgcaaagggcgcgaatcgaagttcaaagcgctgctggcgcccgccagcaactacttctgcattgctttccttgggctgatcctggcgctgatgtgcactatcgacggcatgcgtctgtcggcgatcctgctgccggtgtggatcctgttcctgtttatcgccttcaaactgctgcgccgcccggcgtaagcgagatgccccgccgtccggcggggctgcctgcctttttattgtgatcctcttcgcaggcggcgcatttgcctggcgatcttctttttgtaatcgattacttttgtttttgagtggttttgtaatcgattacttttctgagggcgagcaacatggtcacaacaacagaaggtcgggaaagtgtccgcgtgagccaccgttttctggtgccgcggctgtcgttaatgatgtttatgcagttttttatctggggcagctggtcggtgaccctggggctggtgatgacccgctatgagatgtcattgctgatcggcgatgcgttctccgccgggccgatcgcctccatcttgtctccctttgtgctggggatgctggtggatcgctttttcgcctcgcagaaggtgatggcggtgatgcacctggccggggcggcgatcctgtggtttgtcccgcaggcgctggtggcgcagaacggcgccctgctgattggcctgctgttcggctatacgctgtgctatatgccgaccctggcgctgaccaacaatatcgccttccacagcctggccaatgtcgataaaaccttcccggtggtccgcgtgttcggcaccatcggctggattatcgccgggatctgcatcggggtgaccggtatctctgataccaccggcatcttcacgctggcggcgctctgttcggtcgcgctggcgctctacagcctgacgctgccgcacaccccggcgccggccaaaggcatgccggttcagtttcgcgacctgctgtgcgcggacgccttcgcgctgctgaaaacccgccatttcctgattttctccctctgcgccaccttaatttccgtgccgttaggcacctattacgcctataccgcgtcgtatctggcggatgccggcgtcaaagatgtcagcaccgcgatgtccttcggtcagatgtcagagatcgtctttatgctggtgatcccgttgctgttccgtcgcctcggggtgaaatacatgctgctcatcggcatggcggcgtggttcgtccgctacgcctttttcgctctcggagtcagcgaggaggggcgcttcctgctctatctgggcattttgctgcacggcgtgtgctatgactttttctttgtcgttggctttatctacaccgaccgcgtggcgggcgagaaggtaaaaggccaggcgcagagcatgattgtgatgttcacctacgggatcggcatgctgctgggctcgcagatctccggcgcgctgtataaccatctggtggccggccagagcgtgcctcaggcctgggtgaccttctggtggatcccggcggtggccgccgcggttatcgcgctgattttccttttctctttccagtacaacgagaaagagccgcactaatttttcaggagggggtatgaaaacgattaagggaccgggcatttttctggcgcagtttatcgggccgcgggcgccgttcaacaccctggcggggatagcgcagtgggccgccggcctggggtacaaggcattgcagatcccctgcaaccacccggcgatttttgatgtcgagcgggcggcggcgagccagacctactgcgacgaggtcagcggcatcctggcggagcatgggctggtgatcagcgagctgtccactcaccttgaaggacagctggtggcggtgcatccagcgtatgacgcggcgtttgacgcctttgccccggcggcgctgcatggcgatccgcaggcgcgccagcgctgggcggtggagaaagtgcgccaggcggcggtagcctccggccgcctggggctgcaggcgcacgcgaccttttccggggcgctggcatggccctttttttatccgtggccgccgcacaatcagccgcttctggatgaggcctttgccgagctggcccggcgctggcggccgctgctggacctcttcgacgagcagggggtcgatgtctgctatgagatccaccccggcgaagacctgcacgatggcgtgacctttgagcgttttcttgcgctggtggataaccatccgcgctgcaatatgctctatgacccgagccacctgcatctgcagcagatggactacctgacctatatcgatatctatcatgcgcgtattaaagcgtttcacgtcaaggacgccgaatttcgccgcaacgggcgcaatggcgtctacggtggataccagccctggcagcagcgggccgggcgtttccgctctcccggcgacgggcagatcgacttcaaaggggtgttcagtaagctgaccgaatatgattttgccggctgggcggtgctggagtgggagtgctgcctgaaggatagtgagaccggcgcgcgcgagggcagcgagtttatccgccgccatatcattcccgttgccggacgggccttcgatgactttgccgccggcgggagggagtaacatgattcaggtcgcgattatcggggcagggtttattggcccggcgcatctggaggcgctgcggcggctgggagatgtcgaggtggtggcgttgtgcgacagccgccttgaggcggcgcagcgcaaggcgcgagcgctgaacattgcccatgcctacgacagcgtggaggcgctgctggcccatccggggctgcaggtggtgcataactgtacgcccaaccatctacatgcccagattaaccggcagatcctcgccgccgggctgcacgtcttctccgaaaaaccgctgtgtatgacggcggaggaggcgcgggagctggtggcgcttgccgcccgggccggcgtggtgcatggcgtcagcttcgtctaccgccagttcgctatggtccagcaggcggcggcgatgatccgccatggcgaggtcggcagaatcttcgcggcgcacggcagctatttacaggactggatgctgctggagaccgactacaactggcgggtcgattcggcgcaggggggcgcgtcgcggacggtggccgacatcggctcccactggtgcgataccgtgcagtttatgaccggtcggcggattgtcgaggtgatggcggatctgtctatcgtctggccaacgcgtaaagcgccggtcaatggcaaagcgaccttcagcgccgttcacgaggcgcaggcatatgaaacgcggcctgtcgataccgaggactttggctcggtgctgttgcgttttgacgatggcagcaagggcagctttatggtctctcaggtgagcgccgggcggaaaaaccgtctggcggtggagattaacggcagcctctgttctctggcctgggatcaggaagtgccccagcggctgtggatcggccaccgcgagcagccggatcgcctgctcagcgatgacccgagcctgctgcggccggaaatcgctgacagcgcccattaccccggcggccacattgagggctggccggacgcctttaagaatatgatggggcatttttatcaggcggtgcgcgccgggaagatgccggcggccggggcccggcgcttcgccgctttcgacgacggcgccgatgtgatgtacatcatcgaggcgatcgtcaaaagccatcaggaacagcgctgggtcagcgtcgaacgctgagcgcaggcggggcgcaggattatttcaccccaagatagccgtcgagataggcaccggagagctcgttgccgaacaggacggcatctttattttccatcgcattatcccatttgtcgctggcattgccggtgaaggcgtgctcggtgcgggtgccctgcgccgcctgctgtttgatggcttccgcggtgcggcgggcatcactttcgctcatgccagcggctttatcctgctgtccgcgggcatacatcgccgtaaaggtcggcaggtttaaacggtaattttcctggcggttgacggtgaagttgccgccgacaaaatcggagcggtgggcgacgaaggcgtaggcatggcgttccggtgacgattttgacgaggtgcagccggtgatcgttgccagggcacagctgagggcgagaaccgcggtggtgagcctcatggggatatcatccttaatcataaaagaaaaaatggggcgcaggcggtctgttgcgcctcctgcgctaatgagaatatgaaacggcaaaaggatgcgcgttaacggggcgggagagaagccctgattattaatagttttctcgcgcgttcccgcgctttcgcgccaggctgaccagaggtcatttatgatagcctgcaggatccacctctatggctgcgctcttccacaccggataagctggcaacccttagacgtgtttatcgggctacggcggggatccttatccctataagcaacgttcatgctgaattcacaatgattcaggcattcctcgcacagttcgctacggcagaaacaaattttatttactcttcacatcctccatcgctccgacagcaggcccagactgatttagccgctggtttgcatatcacgtttatctttactgacaggcatcaaaataataaatatgatatttattagctgtaatgcataagcatggcagctaaacataggaacagtatgaggttaaatttcagtttttttttaaacttttgattgcttgcgttgatatttatctgcttgtgcaagggtattatacattaatctttattttattattttatagtaaataaaatacaccttgggtttattgtttacagagtgtttgatattgcttatgtatctttactaaattttttaatgacttgcgaggtgattataatgagagggtgtaactgtgagattaaatgtatcgcctgtggattaaactgccggattgaagcgaaaaataaaatagagcgcactctctgtggagagaagaaattttctgtgtggccagacaggaactatttttttaaacgggcagtaaatgatctggttttccgtgaactcacctgttttgtacctgaaggtatagtggtggtggatttttcattgggaaatatattgtactttctgaatgagtgctggaccaggaaattgcgggatagtggtctgaaaatcattctgatagcagataaaaacatgctgccaatggctaatttttggaggctgcgttccgggttttcctgggcagtagtggaagtgaatagtgacttaagcaacttaattaataaaataaaacgcgttatgctggggcggaaccttctgtgcaggcgcacaccgtcgctgacggagcatgaaatgaagacgctgtgcctgcttgcagaggggcattccagccaggatatcgcccgtatcatggcgtgcgatacccgcagcgtctaccgctttcaatactctttatgcaagaagttcggcgggctcaatcgcctgcgcaatctgcgcttcaggcatactatccccgcgctggattagccgtgattaacccggcgcatccatgaaacagccatcacctaatttatgataacggcctaatgcgacgatatatttcctgttgctattcttcgcctcagggcctgtccagctatcccctggcagcatataaaactgtgtagagctttcatcatcaccattacaacctttctggagaatgactctgaaataggtattgccggtatttttaatggtgcccgtggcttcgttgatctcatactggaaacgcgtttttcgagggcgaacaatgagaatggtgctcatcgataccgaagggacaatattcagttttttctgctccatgcgccagggaaaaaccgtgacgggcgtttctttaaagatcacccgataatatcgctcaatgtcatctccaggcccacggtaatagagtttaaaatactcctggccattggcctgtacggtgaactgcagcggcgaccagaccaggtctttgtcctgaccgggcaccggccgttcattaccgttgcccggcctggcgattttgtaagccgagatggtatataagttattgctgcttgtatcattgactaacggccgggagataaaatctttactggcatccatatcataaatgatggaatcaaagtacaccgcggaagcgggctgaatacacagcccgcacaatccgatgaaaagcattttcttcatcataccccccgatcgacgccaacccaggtggcggtcacttttacatccccggtggcgctgacggttcccatccagtcatgaccatcagtagtgaactgtgaatgcgagtcatccatcggaaacagcagtttcagcgtggtggtaaaaaagaaaccatcgttgacgttggcgttccaggccgtctgaacccaggcggcgttggtcatatcaacggggttttcaccgcagctgttgcgcactcttaccgcgttaccggcagcggaagtccattcgaggaaggccgggaccggcacttttagcgtctcgtctgctgaggtaaacagacagtatggctgaccatatatgttgatggcgtcgccagtcacctgggcggtgatgctgtccgcctgacgcgacgcggaggtagtaactttatactcaaaggtgatgggcgtttcgctaccgatcttgccagatgcttttggatgagcactcccgtcgctggcgataatgctgatgccgtattcacgcgggatgatgttaattagtgttgatggcgtaaactgataataacctgattgaggagtcacggagttatcaaaataaaaggtgaacagctcatctttgttggttaaatctgtgcccgccttgagagcttttttgaaaaaagcgttggacagaaagacatagatgtactcccctgacggtttgaagaccttgttataggtgctagtcgagccgaaattggtccagctggcgccatcaccgctgtacttgacgtcagacgaagaaggggaaaatcccagcagcgtcgtatcgataaccatccggaaatcaagcgaagtggtgagggttttggtttcctgaaagctgtaagacaccattttacaaatgatccccgaagcgctccctaccacccccatctggcacaattcagagccgaggttgacgcttggcgtaccgtcgctggcaatccacacttccgccatcgcgccggtactgtttaaggtcagatgcgagaccttttcgaggttcatcgtgtagtaaacccactttcctccgctggggagatctttacagcgaacgccggaagcaaagtcataatcagctttggagtccatatagcaaagattcaactgcaaattatcgatggttcccaccggccgattacgaaaatactcatatgccgactgactcagcaccccggcgccgtagtaaccattggccacgctgttgccggacatcgcgtgatagaagccgtctttgtcgagtacatcggcggggatatagcccgaagccgggcagttcgcgcccgttgacatgcagcggagcccgagaaacggttggttaatcggggagttgtctatccagaggtcaaaatagcggttgctgtaactccagcctgagttgcccatgtatcccagactacgctggttcgttttatatttcgtccagatattggctccagtgaagcgcggggacagggagctggtggtgatgaaatattcatcatcgacatcgttgtcgataaacatataggtgttgctgccgctcccgtcgttagtagcggtaagtgccatagccggcgcggctagcagccagccggccagcagcatgatggcctggggtttaatagacattcttaatatctccagtcactgatgccgtttgttgttggatctcacaagggatctcaccgacccatacggcacctttcgcttctcgcagatccaaatccacttcgcaaataccgccgaatttatcgaccagggtaatcaccggatagcgcttatcaacgtccatggcgaactcgccgagttcgtcggtgcgtgttttaccaatgtggttatgtatatcggcgttggcgtagtaaccaccgcggcgatctttcacccggccaaatacggtgacgagctgtttgatttccgggttaatcacgctgacattgccgggatagagcacgactttgttccgccggccgttaacgatgtcgacgctgtcttccgaatttttgtcgttcatcagctccaccttgtattcggcgtagggcggaagactgatgaagttgcttttgccggtcagcgggtagttctggccgttgatctgcgccatcatcctccccttgccgctgaaattggtattcaccaccaggcctgcggtttgagtgcctttgccgacataaacatttttttccgtccaggccaggctgccctgcgagctcaggctgtagtttgaactgtgctgcgatgagcggctaacggagacggtgccagcgttatatttggtgtcatagctgacgtaaccattggcggcgtaatcgtcggaacgatagcggctatcgtcatttttattctgtttaatctgcttcgaaaccgatgctcccacctgggtaatagcgctgtcgtcaaagcttttgcgcagcgtggcgttcgccagcatgtttccattctggctggacacgccggtgctgagccaggtagagaaggggatagagacatcaatattgacgtacttatcacgcagattttcatggttgttgtattgatagttctgaataccggcgcgcagcgacacggtcgcatagcgattggctaacagcgattggtcgtaatcgacgttggtataggtgctgccggtatatttgttattggttcggctgacgctcagcgtaccgaggaacggcgcgattttgcgcagattggcattggcgccgatggtcacgtagtcattctgctgcatcgggagcgcgttaccgatggaactgtactggcgcgacccccacaggttgccgtaaccgtcgggtaaactcatattaaaggtggaggtactctgccagctgccgtcggtagcgagcagcccctgctggttaaaactgaacgcgtcgttgaaaataacgttcgcttccgtttcattgacgccgttagtgtcaaaaccgtagagcgtggttttcagattgacgccggaaagccagggttggctggttgccgcggcgatcccggctatccatgtattctttgtgccataattgatgttgtatttgtggcgatagtccatcttgttgtattcgaggctgccgccgaaggtttgccacgagagatcgccggtcacgctcgatttacgggcgaacgttttattgatgttcgccgtccggctgctgaccacgcgcccgttaactaccacctggatatcaacgttgtagatgccaaatggcagacgcgacgtatcgagctcgtagctacccatcgagaagttttgaatgctgagcagtttgccgtcacgatagacgtgtacttcaccagcggccgggagaaacaccgtgacgggcaccagagcaagcgtattgtcctgcgtttgtgaactgcttttattgccatagctgacgccgtaaatacggctggaattcagggcgctcatgctggcaatcgattgcagattccatgtatccaccatacccattgccaggcggcgtccctgatagtcacgttcgtacatcgagcgatacagtttactctcctggttgccggtacctatcccgtaaagagaaccgttaaagttcagatggtgttcccgcagcgaccaggtattatccagcgtcagatagctgctggcgttatcggtattctcatatttgttgtaatagctccccatcgagtaattcagcacgctcgagagattctgggcggtagattctccaagcatattggtacgcggcaaaatagcggcctgcatggctgcccggttaaccgtcagctcgagataaaaggaacgcgtatcaagtgaaagtgaggcgtctttgttgatataaacgcgctgaccgtcgccgatgcttttatcctgcatctcgttgagcaatgatttaatctgaggtgatagttcggttcgctccggcagatcgctgagcgcgatctgattcaggcgaaactcattatccttgatggtcaggatggcatcagcgattttttgctgactgcgttgggtactattatcgccttcataacgaataaaaacagggaccgacatgccctgatataacgcgttagcaaataccgaaggaataatatagttactgactttgactggcgctgtagcattagctgcccaaccctggtttactgtaatcaataacccagcgaacaacgtccctttgacataaccaagattatccatgatgttactcagtttacatttatatattgctcaccgtgccatattccaattcgcgtttttttattggtgagatcggtatgctttatttttacgctgacaccaggcatgacataatatcgctcacggcagccttgtccctcatccttcgctttatcacgacagggaccgtaggagatcacacggaatgaagcgttaccagtattggttaccgtgtcattatcgcgacgatagtcaaatctttcttctcgcggcgcgaccaccagaatggtaccaataatggctgaagtcgttgcctcgccctgttttttctttttactggcttcaaactcggttaccggctcatcggtccaggatattcggtagtaacgttcctggttatcctgaggtcctttgtaaaaaaaacgaaagttctctttagcattgccgggtaatatcaggctggcgggtgttgataataattccgatctgttcgccatcgggataaccgtgccaccggccataggcgatgagatacgctccacgctgacgctaacgtaacgcgccgtatcggtggtattaatgatttcttttgccagagtcgaggcatccggccccattattgaggtgacgtctccgacattaatcgcatgggaggagggcgtcacggtgaataaaaagagagagaggaataatggattcagtttcatggcgcatccttataaggaggccgaggcctccttgtcttaccggacaggtgttggctacacctgattagatagtccagaccgcattaaactgaacgcgaacgtcgccgctccagtaaccgtcggttaaatctttgaactcagcggcagtgctgccgtcagaagtcgcggagtcgatagtgaaatcgaagttaccctgagtgctgacgcgatcggcgcctgcgaaggcggtcgcgacagccagcgcatccagacccgcggaaatgttgttggaagtatcaatcatcgttaccggggtggatttgttcagcgcgttgccgttccagttcacaccgacggccagagtagaggcgtcagtggtacggctcagggtgttgctcacgatctgagaggtcagcgtaaagtcagtcgcgccagactggccctggatggtgatgtcaaaagcgcctttctgagagttaaacgctttaatcccttccgcgtactggaaattcagggatttcagcggagtgacaactagcgcgctggtggtgtctttcgttgcgcttgcatcccagcttgcagtggcggaagcagttacgtcagccattgcgttggaagagataagagccgcagccgcaacacctgctaatacgatttttttcattttcaatttcctgagaataattaagttagttccatttatggagttattgctataaatactgataatgactttatccagataaaataatgtttaacttccctctgcctcccatcttattctgcaagctgagcttgattgcgtagattcttttttctgccatctgcaattcttgtgctatctctttaactgacttctctgcaagtaaaagatcgagtaccaatacctcttgagcgcttagtttctgacgatagccgcgtccatctttttggccgagaaaggaaagatgtattttcctttcaatctcatttcgggtatcgctggtatagataattgaaagtatttgctgacaacggtgtttccagtacaacgccagtggttgcgctaatctgtcggcaatcaaaactatccgcaatcctgttttgatcagatattcaatccatttatcattggtgaataatctgatgttgtagcgagaaaaatcaacaaaaacatatccagaattagagaagttgtaatgcttgttaattaaaaaacaatgcacgccattttttaagtagatgtttttatcaggccatacgcaatagtgagtttcaatacatctaatcgattttatcgtaggtcgtggatagatttcgcactgatactggcagctaatacagtatgccttctcatatttctgtggaaccatgtgtcgatttatttccctatattgtcttaccttatcgttcaatgatgtggctatattatgactagttaataaatgtgacaactttaatttcaaggtggttattttgctgaaaaatgtgtaaattcttaaagtcaaaaaatactgcgaatcatactaacctgctcttattaataagaaaaatcttaatgggcagaattttatagcgaacgcagcttaagaattatccattgcgaccaggaattttctcgctgaatgagcagtaattggttaaaaaaaaacagcacaataagtcaaaaaaagcgcagccacacactattttgttaacattttgttttaaatttgttttttaatttgtgttttttcaggcggatattcccttttttgtaaggtgaagttgcgctgtttgatgctcagagtgaaagaaggcgcgggcaaaatatgatctggcgtacaaaacagcagaggcccatgcataaagacgcgttaatgtttaaggagaactcgtcagcagtctgtgcggaatagtgatggtacaaagcggacaaacaggtcacggagagagttaggggggccgcatggattggctctgcctacaggtagccgtaaatacttcaagacgaggatggtgtggatttttacttgcagataaatgagccaaaactttcgatgcgtttggggtggttacacccctttcagcagagggagcaggtggttttcggtaaggggagcaagcttaatatgccgatcctgacccggcgtaaaccagatcacttcttctatttccatcgtcggtgtaaagcttaccctgttcgtggctatcagaaagacatccgcagagacaagatgacctggctcgtttgccgccgcatcagtgaaacggcctacctggaccagttcttctggtgagacgctgaagttgagttcctcctccagctcgcggatcagcgccgcgtgcggggtctcgccgatttcaggcttgccgccgggttgcataaaatattcagttccccgcttacgcactaaaagacagcgtccctgactgtcggtgataattgccgctgcgataataatcattttcattgcgctcaaaataccccatttctataccaatgccgtagcatactcgagtgagttttgcattttgcgaaattacatcagcgccaccatgatagcccgctaagcgtgctaatcaatcccgtcatgttttgcaaaagcggttaacgtcctggcatcgcaaaagcgtaaggctcccagttcgcacgcagcccggctagcggcgcgggctgcgctcatttatgatagcctgcaggatccacctctatcgcaggaagtgcagggtttatgtctattcagaaaattgctcgtctggccggcgtctcggtggccacggtgtcgcgggtgctgaacaacagcgatacggtaaaagccaaaaaccgtgagcgcgtgctgcaggcgatcaaagagagcaactatcagccgaacctgctggcgcgtcagctgcgaaccgcccgcagcaatatgatcctggtgatggtctccaatatcgctaaccccttttgcgccgaggtggtgaaggggatagaagaagaggcggagaagaatggctaccgcattctgctgtgtaactccgggtcggatctggcccgctcgacctcgggcctgcagctgctctccggcaaaatggtcgacggcattattaccatgaacgcgctctccagcctgccggaactgaccaccatgattggcgatgcgccctgggtgcagtgcgcggagtatgccgacaccggcagcatctcctgcgtcgggattaacgacgtcgaggcggctcagggggcggtgtcccgactggccgatagcggccgccgccgcatcgcgctcattaatcacgacctcagctatcgctatgcccgtctgcgcgagcgcggctataaaagcgtgctgcacgtgcacggtctggcgtatcagcaggtgacctacgcgcaggatcttagcgcggcggccggtaaacgggcgatggagcaactgctgtcgcaagacgagaagcccgatgcggtgtttgccgtttcggactccctcgccgccggggcgctgcgggctatcgcccaggccggactacgggtgccgggggatatcgcggtgatcggcttcgatggcaccgagctggcggaagtggtctccccgcagctgaccaccgtcgaacagccctcccgggcgatcggccgtacggcggtgtctctactgatgaaacgcatcgacgatcccgacgctgccgtcgagcgggtgatgatggactggcgcgtgatagaccgcgccagcgtctgaggatcagcgggagaaggcgccggtcagcgcgcgaatatcgttgccggtgggcgtttgatgaatgcgtaagccaaactcatccaccacagcgaagacatggtcgaaaatgtccgcctggatcccttcatattccgcccataccacggtgttggtgaagcagtagatctcgatcggcaagccgttggcatccggcgccagctggcgcaccatcagggtcatatcctggcggatgcgcggatgatggcgtaaatactcctgcagataggcgcggaaggtgccgacattggtcattcgccgctcattgagaaccgactgttccccggcgtactgctggttccaggcgcttatctcttcgtggcgtgaatccatatagggtttaagtaatttcgcccggatcaggcgctgctgctcctgttcatcaagaaaatgaatgctggtggtgtcgatgttaaggctgcgtttgatgcggcggccgccggaggccgacatgccgctccagtttttaaacgagtcagagaccagcgaccaggtcggaatggtggtgatggtattgtcccagttgcgcaccttgaccgtggtgaggccgatatcgatcaccgcgccgtcggcgccgtactttggcatctccagccagtcgccaagcttgagcatatcgttggccgagagctgaataccggccaccagaccgaggatcggatctttaaacaccagcatcagcaccgcggccatcgcgccgagcccgctaatcaggatcgccggtgactggcctatcagcagggaaataatcaggatgccgataataatcgccgtcaccagcttaatcccctggaatatgcccttcagcggcagctgtgaggcggcgggaaatttctgcgccagctttaaaatgacatccagcagcgagaagaaggacagcatggcatatatcatcacccatagctgggccacggtggttaatatttccgcggcctcgctgcctttttgcagccacagcaccgcctggacgttgacgatgatcccctgcagggtaaaggccagtcggtgaaagagtttattctgcgtgatgatttgcagccacagatggctgctggccagcgcccgtttttcaaatgcgcgcaggaccactttgtgcaatatcagatgcacgaccacggcggtgaacaagataatgccgaagataatcatcagcgagcgggtgggggttatttcgattcctaaggcggcaatttgcgatattaattcctgcataacgtctcctgaatatccagcgggtatgatgaccgctggatagctattatgcaaattaccgccgccggtattacgaggccaccgtcgccggctgtcggttgagatgatggcgtagccacagcgctatcgcccccagcaacagcatcatggccacctcgaccagcagaaaatcaatcagcgcctgcggatagtttccgccgccgcgacgggccagcgccaggaacagcgaaccaaggatagccggtccgagaccgagggtcgcctgctgcagggtgctgaggattgcgctcccggccccggcgtcgctggcgctgatatcgcgcataccaatccgataaaagctgttgacgatcagcgcctggccatagccgatcagcgccgtggcgggaaccagcgtcagggcgttggtggcgacgccgaagcgggagaaggtggcgcacagcagcaggagaccggcgatctgcaccgccagaccggtcagcaggatccgccccatgctgtagcgggcgataagccgcggggcatacagcgccgaaataaaataggccacgccgagggcgataaagctattgccggactgccacggcgccatccccagcccctcctgcatggtcagcgccatgcagaacataaagccggaccaggcgccgaaaaacagcagggcgatggccatcccgaagcggatgctggtcaactgcagcagacgcggcggcagcagaggatggtcgccacgctgctgctggcgcagggcgctctgacgcatggcgaacagcagcggcaggaccgccaccagcatcagctgcagccacagcggccagtgcagctccggaccgagggccatcgggaacagcaggcagcagaggatcagcgcgaggtacagcgtaccctgccagtcaatccgcgacggcgtctcgcgacgggtttccggcacatagcggcggctcagagccagcaccagcaggcagatcggcacattgataaaaaaggcgttgcgccagcccagcccggcgatgtccgccgacaccagccagccgccgcccatctgaccgacgataaaggcgatcccgccgatcccgccatacaggctgatggcccgggcgtgggcggggcctttgagggtgacgtgcagggtcgcgaggatctgcggcacaatcagcgccgccccggcgccctgcagggtgcgggccgccagcagggcgccgatgctgttcgccatcccgcacagcagggaagcgatgccaaagagggcgacgccccacataaacaggcgccggcggccatagttatcgccaagcttactgcccatcgccaggcagacggcaaaggcgacgccgtacagcgcgacgataagctccagctgcgtggcgctggccgccagggtgtaggtgatggcgtccagcgccacattggtgatcgaggtatcaataagcggcagcatctggccgctcagcagcagcaacagaccggcgcggccgggtgaaacagcagacgtattcatgggattctccattgcgtcattcagcagaccgacgtagcattaccgataaattaaacgggtaccagttcctgtctatactggtattggcactactatgctggaggggtgatgaccacgatgccgcaacgggagtcgacgatcgccgtgccggacgatcgacgcaaacagctgggggcctttctgcgcgcccgccgtgaaagcctcgatccgcagcgcctggggttgccccgggtgggccgccggcgcacgccgggtctgcgccgggaagaggtggcgatgctcgccgacgtcggcgttacctggtacacctggctggagcaggggcgggaggtgaatccgtcggaggcggtgctggtgggggtggcgaatgccctgcagtgcagtccgctggagacccggcatctgttcgtgctcgccgggctgaccccgccggaagccacccaggtgacggtgtgcgaaggcatcagcccagggacccgccggatgctggacagcctgatgccgcagccggccagcattcagaaaccgaactttgatattgtggcgtggaacgacagcttctgccgcctgatgggcatcgatttcgccaccctcccggaagaagatcgcaactgcatttatctctatctgacccatgagacctggcgcagccggatcgaaaatcgcgatgtgctgccgaccttcgtctcctatttccgcgccgcgatggccgagcaccgcggcgatccggcgtgggaaaacaaactggcgcgctttttcgccgcctcgtcggagtttgaagcgctgtggcatcagcgctacgaggtgcgcggcgtggaaaaccagattaaacattttaaccacccgcagctcgggcgattcagcctgcagcagatgtactggtattcggcgccgcgcaacggctcgcgcctgctggtctacctgccgatggacgaggcgggcgagcaggcgctggcgtggctggaccaacattaatcacagggaatcagatggctggcaatgtgccatcttcgggtattgcccggccggcgctgctggacggttccctttccctccgggagtaggggagggaaagcactgtcgggaagtcctgtatgtgatctacgacttcagcacacattgcgctcccgatacgccttctgcgttatgtcactcatggcgcagggagcgcacagggggcaccagtcgccgccgccccctgtacccccgggctccggccagcaacatcgccgctgcgcggtgccttcgacttatccctgcaggcttcgggtcgggccgaggcagcgtccatgcaaaacacggccctcagcccgcatccatgcgggctgccccggcctgccgggaacgtctcagcgatgttgaggccgcaacaccggcagtttcagtcgcacaagtgggtaagttaacggctggctgatacggaccgtaggccgggtaaggcgccagccgccacccggcaataaagcggctccgtgcctgatatcatgctcggcggcgctgcgcttacgcgggcttacggtaaggagtaacaatctgatatataaatggttaagtaggccggggagggcgacagccgctgcccggcagaaaggcgagcatattagcgaaaacaggtttgtcatcagtctcaaggaatgcctatgaacgtaacccgaaaagagcagcgcattattcagcgcgcgctgaatgcctggcaggccagcggggagttaaccccctcggacagccagcggctggcgcaaacgatgcgcgtctcccccttcgactggcggcgcctgagccgctatgccttctggaccgcgctggcctgcgtgctgatttccctgggcagtctgttcgccgacagcgagctggtggcgtggctgctgagcctgttcagccactcggcgctgatgcggatcctgctgcctgcgctgctggcagtcgtctgctacggctggggttttcgccgccagcggcgggagacgcagtggcactacagcaccgaggcgattttgtttctgggcgtcgtctttaccgcggtggcgctatggcagcttggcgaacggctggataacggcagcggccatatcgcaccgctgtttctggccggatgcgtgatttacggtgccattggctatattgcccgctccgggctggtgtggctcttttttctgctggcgctgggcaactggttcggcgcggaaaccggctacgtctcggggtggggcgcctactggctgggcatgaactacccgattcgcttcgtcctgttcggcggcgcgctgctggcgctctgctacggcgcgcaatccctgcttcgccagcggcagctgtttaccgtcagcaaggcgatgggcctcacgtacctgtttattgcgctgtggatcatgtcgattttcggcaattacgacgcagacagctggtaccaggtgagccaggcgcgactcctgccgtgggggctgctgtttgccgtagcggccggcgtctgcatttttatcagcctgaaaaccgatgacggaatgctgcgcggcttcggactaaccttcctggcgatcaatctctatacccgtttctttgagtttttctggaacgggatgcacaaagtgctgtttttcctgatccttgccgtctcgctggcggtgattggccgctatgccgagcgcatctggcatgcggggaacgttaagccatgaaaaattaagcgtttttaaagaagtgtggctggcggcagcgacgtcctgcgcgaattgtcgtataagcgaattttacgcttttgacaggggagcgagatgaataaggagtcgatttttcgccaactagaacaacggatcgccgggcgagcgctgacggcggaagcgctgggcgagtttaacgctatggccatcgccgatagcttgaagcaaaaacgcagcatcatcagccatcatctgaataatctccatcgcgagcagcgggtggtcaaagtgaacggtcgcccggtgctgtttttacccgttaccgttctgcgcgatcatcaccgcctggcggttcggcacggcgaatacgcctccattcaggcgctgtgcgcggatcgtcaggatagtctggcgcagctgattggcgcgcagggcagcctgcaggaagcattgcgccagtgcaaggctgccatcagctaccctggcgcaggtctgccgctgctgctgcggggccctactggcaccgggaaaagttttctagctcgccagctctggcactacgcaatagatgaaggtattttacctgccgatgcgccttttaccgtatttaactgcgccgagtacgcgaataatccagaactactgacctcgaagttatttggtcatgcgaagggggcctttaccggcgccgataaggccgttcctggtcttatcgagaccagcaacggcggggtgttgtttatcgatgaggttcatcggctgccgcccgaaggccaggaaaagttgtttcattttatggataacggtagctggcgccggctgggggagagcgccgacgagcgcagcgccacggtgcggctaatttttgcttcaaccgaggatctggaaaaacacttcctggcgacctttattcgccgtattccggtgattgtaaaaattctgccgatcgctgaacgcggccaattcgagcggctggcgtttatccaccactttttccgccgtgaagcccagcgtttgaaccacgatctggcgctggatggcgaaatcgtcagccagctaatgcgtgaaacgcttgaaggaaatgtcggtgggctggaaaatttgattcgcaatatttgcgccagcgcctggacatttggcgaacgtgatagcggtcttttacatataaaagcgggtttgctgcccgaccgattactggcggatgcgccttttacccttcagcaaaatagcgagcgggttatgatttaccgcgatggcgacgcgcagcctcttttttctggtcgtcaccatgaataccaacggctaacggaaaatatttgtagcctgtgcgaggagttggctcaggataatattagcgtgcggacctttgaaaagcttatttatcagaacgtgacgctctatcttgatgcgctgatgaatcaggagagtacggtctctctgcaggacaaacggctgcgctttattgaagatgtgggcaaagcaatcgctgtcaattatgaccttcagctaaatgtcgaattcgcttatcttaccggccgctacctcaccagcctccctctggcgccgcgcagcgttgctgagcccgtgcgtctggtgatgcagcgctggctggactcctcggcggggctggcgcaacgcatcgcggagaaactactggatgtcgtcaataataaatacgatctgctcatcgatacgcttgaccgtctggcgattaccgccattgtcagtaatgctatcgatgcgaccagcggcggaaaagtgaaagcgctgataatcgcccacggttattcgaccgccagcagcattgccggcgttgccaaccgcctgattggcgagaagatctaccaggccatggatatgccgatggaggtggcgtttaacgatgtcagtcgcgccgtggttgattatctccagcatacggacacgcgtgcgggtgtgatggtgcttattgatatgggctacaccaaggagattgccgatgcgcttttgtcggtgattaacggcccgctggtagtggtggataacgtcacgacccgcatggcgctgaacgttgccagcgagatcgcgttgggaaaaaacatcgaacaaatcgccgaagagatcgtgccgcttaatcagtcgcgttgggatgtgttctggcccgcagaaaaaaaagagcgtgtgctgctggtgacctgtattacaggtatcggtaccgcatttaaatttaaaaatctgatggagaagagcctgctcaacgattttgatattaacatcatcgcctgcgagtatacgcgcttaaaaaacagtcgtacggcggtatcgttgctccaccagtatgaagttattgcggtcgtgggtacccacgacccgcagctggccggagtgccctgggttggcattgaggaactacttggcgagcaggggcatcgacatctgagtcagctcttaagcggctatcttaatgaaaagcaaattgcgctgattaataaaaatatggttcgtgagttttcactgcataacgttgtcaactctctgacgatactgaatgctggaaaaaccatgggccatatcgaaaccattatcgctgagtggcaaaatacgcttggttttcattttaataataacttaattatcagtttatatgtgcatctcagctgtatgattgagcgtttggtaatgcgtaatgaaattagccattataaagatcttgagcaatttacccgccagcatggtgaatttattgccatggtgaatcactcgttccagcgcctgaaaatactctataacgtggcgctaccggtagcggaaattggctatattcacgatatttttgaattacgtattgaagattttagctggtaatcctcaacgcagccccggagaattacgccggggctggcaggcggttagcgaatcaatattcgactttccacatatagcggcgggtggtcagcgggtggttgcgagcggtggccagcgccaggttgtaaacatccagtacgcagttgtgcagcaggccgcagaaatattcgcgcacgctggcgtgcagtgcgtcgattcccaccttttccacgtcaataatctgcagttttccctggtaacgttcgataaagcggatcgcgcgatcatccagcgggcgggtgcggccgctgctttttaataaaataaacggcgttcccgtttcggtaatctcaaaggggccgtggaaatactcgccgctgtggatgctggcggagttaatccactgcatctccaacagaatacagatggattcctgatgcgcggcgccgaatgaggggccgctgcccatcatgtagatgactttttcgctcttccaggcttcggcaaaatggcgcgcatccgcctgaacctgctgctgagcgccgcgtaccacggattcaaaactggcaaaggcgctgaccatctcatcgtaatgggcgtatccctcagtttgcgcaagcacttccagcgccagccacaggctgtatgccgctttttgctgcgtcggatcgacggtttcgggatagcgcgcccagcagtattcaatagtgtaatcgctgtgttcgcacagcggcgtgccgggggtatataccagtccaatagtggcggcgcctttctgacgcgcgatgcgggcggcttccaccgtttcagcggtgttgccctgctgcgaggcgaggatcactacgctgtttttacctaacgcgttcggcgtcgcatggacaaattcattactggtaacatagccgacggccagctttttagcttcacaatcgagaaaatatttccccggccagaaaccggttaatgaaccaccgcagccaacaaaccatacgcgctcaatgtgctgcttagataaaatatcgcgaataatagtatgtgcgttttgatgagctatagacatattggtctccttgggatgtaacgggtcctccgctgaaacgcggataacttttactatgcgtcaattaattgagttgtttacttttcattttctggtggaaatgcggatccttcggtattgcgggatcgatgcccttcactggcggcagtcgggcacaaaccatttgtaacggaataatatattcaaagaccgcaaagtcgggatcgttaataaatgcgaagggcatatttttgccgttattttcgacttgtggaccaatgcgataaatatgctgagtccagccgccaagtatttccgccaggcgatcctgacgctcatcgggaaacggatcgagcatgatcagggtagagcgctcgtcgaaggcgttatagatcccgtggatgaactcctcaaattcgtaaccggcaaccggacagcgtagcgtttcaagcatctttagcgcaccttcctgaacggtgccaaacagccttgccggaccggtcaggcgaatgtccgcgctgtcgataagcggtcgggcatgattgagaacccacgcctgcgaggcctcaatgagcgtaggcaaatgattaaacgtggtatccatgcggacgagtagcgccttgcgctcctcatcgctcaggcgccgctggcgactggcgacagcaagccccagcagcatcagattaagtatggtgcagtgataccctttggttttggcgccagcccgctcttctccacagggtactgttaagaccaaatctgccgcccggtcgataacggctggcgcttccccggccatggaagcggtaagatgcccggctgcccgggcgcgttccattgcggcgagggtagagaggctgccgcctccctgagaaatgccgatgaccagcgctttgtcgctgagggtcagcgccgaatcatccagcagaaaaggccagtagacatcaacgggtagcccgcaccactgctgcataaacgagcgggcggtcagcgcgccgtgataagaggtaccggagccggtcaggataatacgcgtgacgccgcgctccgttagcgcttttgccgcctgccagagatcttcccgcgtctgcgtcagcatagcgagcagacaggcgggtgtttcattcatatagtcttctacgtgcatgggtgatattcctcttcttaaagcaggcctagcgcgctggccgccatgccaaacgcgacggttcctagcaggatccagttaatattgactcccttgcggatcaacttgtacatcccaagggtgaaaagcagcggcagcagcgaaggaagtattttgtcaataaactcctgcgccttcatggtggtctgcccggcggtaaagctgagcggggtggtgatatctatcatgctggcggtcatcgcgccgacgaccatgaggccaacaattgatgcgatataggtcacccggtccataaggccgctttggtaaattctcatcagccaggtcgtacccgcccggtagccgagcttcaggccataccagcggcacaaaagatgcggcaggttataaactaacagcgccagtatcggtcccagcaggctgccctgctgggcgaaatagatacccatcccggcggcgataacctttaatgatccccagaatatggagtcgccgatgcccgccagcggccccatcaggctggttttaatcgcgtttatcgactcctcattaaattctgggttacgctggttctcttcttccatggcaatcgacaggccgaagataaaggtcgagagatggggcgtggtgttaaacagcaccagatgacgctgcagggcgcgccccagctccgttgggtcctgatagatgcgcttcagggctggcgacattgcgaaggcatagcccatatgctgctggcgctcgtagttccaggagccctgtagcgtaaaggagcgccagaacacgctgcgtaaatcgcgggcggtgatgcggcttgcatcatcgctttgcggctgggtagcgccagccacagtttgcgtcatttcgctcatgattagctctcctgctgattaagattaaggaactggctgatgataaatgccaacaccacagcgaacagcgcgatggcgataatatccagtttggtatatgccgctatcagaaatcccagaccgaggtacggcatcagtttgctgctgagcatcatgctgatcagcagggcgaagccgagcgctggcaggatcttactggcgacgatcaatccattggttatcaccggtggaatggcctccaggaaccagcttaccgccgaagaaccaagcagaatggcaaaaaataccggtagaaatccgtttaaaaaatagagtagcgtcggaccggcgaggtgcatcaggccgaccattcgggtattaccctgtgccgcatagcggtccgccagatgaccaaagcgggcgttcaccacgcgcaccaggattcccagcgtctgcgccagcattgagacagggatggcgatggtgagcgcagcctctggaccacgaccggacatgatcgaaaacgcggtggccaatacggagccggtcacgatatctggcgggtgcgcggcgccgatggcgacgttgccgaggaaaataagctccagcgtagcgccaatcagaatcccctcatgtaaattaccgcagaccagaccggtgagggcgcacatcaccagcggtcgatcgatcattgataccccaagcaggcggccatcaagtatccccagggcagcgatcagtccgagtaacgttgcggtgagcaacatagtgacctccgaagttaaagttggtcgttaaggagttcagccgagtgggcgggtacctgacgcatctccagccgaatacctttttcttttagcactctgctatgggcgatttcctcttcggtcagatagatggccttgccgaattgtcttgccccttccttctgtggcagaccgccgtaattaattgcgctaattcctgggactttttccactagcgcgagggtttccgcagtattgcccaggaccaccatgacttttttatgatccaacttgccgctgttaagcttttccgccgcctgttcaacggtggcgatgtccagcgtgacgcccgctggctttgccaggttaagcgacatcgtaatgaaggcatccgccgcggctttggcgttggcgacgatgatatggtcgatatccagcgctcgggtccaggcaaaaaccacctggccgtgcagcagccgataatcaatgcgcacgagtttaatcatgagattctccctgtgggtcagaggatggttgtgttattagaggattgatgaaaacaatggattcacgcgccgcgctggtggcgtagataatcgcggcctcggtagtggcttcttcgcacagcagaaactccagcagcagagtcagattgatgccggcgaccacgaaaacgttgcgatgtcgcatcaagacgctcacggcgctattgttgatactgccgccaagcaggtcggtgaagatcaccacttcatcaccattcgcctggacgatgagatgctccagggtttgctccagctgttcggtggtcacgatatcttcgtcataggcgcagaccgggataacgccgtgttcgtcgccaatcagcagcgacaaactgttcaccagtccgcgagcaaaatggccgtggctggccacatagatatgtttcacccggtttctccttcatccagatagcggtatctgttaagagcaaagggcgtgccagaaatgaaaagtattatttatcaattaattaaatcgtctggttcacactaaagtcgttattcctggcacaagcgggattatgagcgccagaaacttggcacaaacggcagaaaagagggggaaagagtgggtgaagaaagtcccgggcgagacgctgctgcgccatggcccgggcgttcccggcagaagggaattaaatctcggtaatggtcgtcgactgcggcagacgcgacttcggcagggtagcgttgaaatcttctacgctatggtggccgacccggaccaccaccaggctggtgtagccctgggctttcaggtcaaattcctcatcgaggatcgcaaaatcgaccccttcaatcggcacggcgtcgagacccatcgccgctacgcccagcaggaaattgccgacgttgagatacacctgctttgccatccactgatcgtcatctttcagctctttgcggtgcatatcggcaaagaaagtgcgacccttgtggttagcggcttttgcgtccggggtggcgaaacggccatcggcctcttcctgatccaccacgcgctgcagccaggcgtcgtccatcgcggttttcgcgcagaacaccaccacgtgcgaggcgtcaagaattttacgttcgttgaacacgtaggtgccgctggcggctttcgccacgcgagctttcccttcatcggtgctggcgacaataaagtgccacggctgggagttggtgctagacgggctgtactgcagcagcgttttcagctgttccgcttccccggcagtcagctttttcgtggcgtcaaaggccttggtggaatagcgcttcaaagcgaccgatacgatatccataactcttcctcacagtttacagcaccttaccggtgcgttcaggagaggaagagtacagcgaagatcgcaaaatgataagggtgaaaaatgcgataacacttatcgcatttggctgaaaatcagcgcggacgcaggcgctgctgggcctttttactcagcttgttcaccacctgatgccacgaatcgtcaatcagctcggccagcagatcctcgctaatatcctctcctggcaccaccgtgatccagtgtttcttgttcatatggtagccgggttcgatactgcgataaatttgctgattcagcagcgacttctgcggctcggctttgagattgaccagcgcccggccgcgaatagtcatggtgatcataaagatgcggccgtcgaccttaaacacgtcgtactctggcccaaagggccagcagtgttcggtaaacgggtaggtcagggcgatacggtgagcgcagggatgcagcatctcaggggtcatttggcgtccgcctcatgcagggcgtgccacatggcttcaaagccgagggcgataatctcccgggcgcgctgcggatcgtggctggcgaattcgatgatggtttccgccagcgacagaaacagggcgtcgccaaaggcgcggtacgcctcgctgaggaatatctctttcaccgacagctggcacatttcgttgagctccggaaagctctcttttacctggcggcgggtttcgtcggtgatgcgctcgctgagcgccatccggcggatcgctttgtgctccatcgggttgcgcacgccccagtcgatatagctgttccagatattgcgcgcgttctctttcgggcgcttctcgtccggatccagcccggcgatcattgtgcgcaccaggcgcagcttaatcgcgaggtacagctcgttgagcaactcatccttggtggcgaaatagcgaaacagcgttccctcggccacaccggcgctgcgggcgatggccgacgtcgaggcggctatgccggactgggcgaaagccgcggtggcagcttccagtaacgcttgctttttatcttcactctttggacgagccactacttttttcctcacgcaggtttaaacaaaccgccgatcttggcacgtctgaccaggtcgctgcaacggcggaacgcaaaaattgaaaatcgtcttgacgactttcatcgctttcctaataatgagtgcgtactcactcataatcaagttatatcataaagcctccgggatgggggcttttgtctggtcaggatatgaaccgtgtcactttcagcgtggtcgccatcatgttactcgcagcagcaacgacattgccgtttgttcttaatgccggttttggtaaggcgccgcagggggtacagcttagccaggtggaagcgtctccccactaccgggacggccagttccataaccagttgcccacgccagggttcaccgggcagaaaaatatgctggcggcgtggtgggatttcctgatgaccaaacgggaaaacgcccgtcccgcgcaaccgctgccgctggtgaagaccgatctggcgacgctgcccctcgggcaggacgtgatggtctggctcggccactcctcctggtacctgcagctggcgggaaaacgcatcctgatcgacccggtgttcagcgattacgcggcgccgttctcttttatcaataaagccttccccggcgactatccgtggcgggcggaagggatgccggagatcgatctgctgatcatctcccacgatcactacgaccatctggattacgccaccattcgcgccttactgccgaaaattaagcgggtcattacgccgctgggggtcggatcgcatctgcgctactggggaatggacggggcgctgattaccgaagcggactggcagcaggcggtaccggccagcgacgagctcaccgtccacgtgctgccggcgcggcacttttccggccgtgggctgaagcgtaaccagacgctgtgggccagttttctgttcgttacccggcagcaaaagatttattacagcggcgacagcgggtatgggccgcactttaaagcgataggcgatgagttcggtccggtcgatctggcgatcatggagaacgggcagtatgaccaggactggaaatatatccacatgatgccggatgaaacggctcaggctgccgacgacctgcgcgctcgcgcggtgctgcctggacatgctggacgattcgttttggcgaaacacagctgggatgaaccgtatcaacggctggcggctgccagcgaaggaagggcctggcgtctgctgacgcctgtgcagggcgagccggtgtgggtcgccgataagacgcaatcatttaacgcctggtggcgctaagcgccagtgcagtatcagaggagagagcatatgacgatttccgctcaggtgattgatactatcgtcgagtggattgatgataacctgcatcaaccgctgcgtattgatgatatcgctcgccatgccgggtattcgaaatggcatctgcaacggctgtttttacagtacaaaggggagagcctggggcgctatattcgcgaaaggaagctgctggccgcccgcgatctgcgcgacaccgatcagcgggtctacgatatctgcctgaagtatggcttcgattcgcaacagacctttacccgcgtcttcacccggaccttcaatcagccgccgggcgcctaccgcaaagagaaccacagtcgcgcccactgaggcgcgcctctcctggtttaccgctcgagggaaaaccagcgacgccacacccagcgcagcaccagatactcaatggcgcccagcgctaagaaccacagacaaaacagcaccgtatagagctggttgagatccatcatatggaatgtctcaaccagcttttgcgccagcgtcaggcccagcgaaggcgcgggcaacagcaaacaggagagcagggccagcagtaagatcccggcggcggagagcagcgtttccagtggatgtttcatgtcatgttaatcatcagttaaaaaacatattgtccggtaaaataatgcttaacgcaatatgctttgtttttttactcgctataacacgactattttaaatattaccgcctacctttcgctctcatgttaattaatctgaaataatttgtaattaagttaattgcagccggatgtaaattaacgtcattattatgccagcgcttttacaaaactgtaagtgctatatcccaccagcgtggcaatgataatggctaacgcgatgtacagcgccagacggcgcccgcggtagattccaaacatattttacctcgtttagttttggtttattaatattctgtaatagttggtttgtggaattaacttatcacaaaatttttattttgcgaaaaatttagacttgtattggttcacatttttatcggcatttttgccctcttttacttcattggccaggaatgatttcaggctttccgactcacggaatttataaggaaaatgtaaattgaccaagatgaataacccaaagtttacgacgccctcgggcgacaccgcgccacggcaggtctggcagcagaccgttgacgcagtgctggcgcagaccaaaagccaggccgctgggttaagttccgcagacgccgccgagcgcctgaatacctgtgggccgaatgcgctgccggaaaagaaaggcaaaccgggctggctgcgctttctcgcccactttaacgacgtactgatttacgtgctgctggccgccgcggcgctgaccgccatcatgggtcactgggtcgataccctggtgatcctcggcgtgacggtgattaacgccctgatcggccatattcaggagagcaacgccgaaaaatcgctgcaggggatccgcaacatgctctccagcgatgcccgcgtccagcgtaacggcaagcatgagactatcccgacgcgcgacctggttccgggggatatcgttatcctgcgcgccggcgaccgcgtgccggcggatatgcgcctgattgaaacccacaacctgcgggtggaagaggcgatcctcaccggcgagtcgacggtggtggataaaatcaccgacgcgctggagggcgatctgccgctgggcgaccgggtgaacatggtcttctccgggaccaccgtcagcgccggcggcggcgtcggcgtggtgaccgccaccggcgcgcagaccgaactcggccatatcaaccagatgatggcgggtattgagaagcaccgtaccccgctgctggtgcagatggataagctcggcaaagcgattttcgccattattctcgccatgatggtggcgctgtttattttcagcctcgcgctgcgggatatcccgatgggcgagctgctgctgtcgctgattagcctggcggtagccgcggtaccggaaggactcccggcgatcatctcgattattctgtcgctcggcgtgcagacgatggcgcgcaagcgggcgattattcgtaagctgccgaccgtggaaaccctcggcgccatgaccgtggtctgctcggataaaaccggcaccctgacgatgaacgaaatgaccgtcaaagcgatcatcaccgccgactgctgctatcgggtggaaggcgacagctacgagccgcaggggcggatcttcctcgaggggagcgatgagcccgtgcaggttcagcccggcaccgtgctggagacctggctgcgcaccatcgacctgtgtaacgacagccagcttacccaggatgagcgcggtctgtgggggatcaccggcgggccgaccgaaggggcgcttaaagtgctggcggcgaaagcgcagctcccggcggtggaggcccgtctggtggccaagatcccctttgactcgcagtacaaatatatgtcgaccctgcagcacatcgatggcaatgcccgggtgctgatcaccggtgcgccggacgttatcttcgccatgtgccgcgagcagatgagccgccacggcgcggtgccgttcgaggcgcagtactgggaagaggagatggcgcgcttcgcccgtcagggactgcggatggtggcggcggcctgtaagccggccagccttgatgccaccaccctcaaccatgaggacctgcaggagggactgattttcctcggcatcgccgggatgatggatcccccgcgtccggaagccattgacgccatccacgcctgccagaccgccggcatccgcgtgaaaatgatcaccggcgaccacccgcagacggcgatgagcatcggccagatgctggggatcaccaatagcagccaggccatgaccggctaccagctggagcacatggacgatgcggcgctggcgaaggcggcggtggagtacgacatctttgcccgtaccagcccggagcataagctgcgcctggttaaagccctgcaggataacggcgaagtggtcggcatgaccggcgacggcgttaacgacgcgccggcgctgcgccaggccgacgtgggtatcgccatgggtatcaaaggcaccgaagtcaccaaagaggcggccgacatggtgttgaccgatgataacttcgcgaccatcgccagctcggtaaaagagggccgtcgggtctatgacaacctgaagaagaccatcctcttcatcatgccgaccaacctggcgcaggggttgctgatcatcatcgccctgctggcggggaacattattccgctgaccccggtgctgatcctgtggatgaacatggcgacgtcggcgacgctctccttcggcctggcctttgaggccgcagagcgcaacgtgatgaaccgtccgccgcgtaaaaccggccagcatgtgatggatggtttcgccgtgtggcgagtggctttcgtcgggtcgatgatcgcgattgccgcctttatccttgaggcctggctggcgccgcgcggccacagtccggagtttatccgcaccgtgctgctgcagatgctggtgacggcgcagtgggtctacatgatcaactgccgcagcagcgacagcttctccctgagcatgggcctgctgcgcaacaaaggcatctggctggtgaccggcgtcctgctgctgatgcagctggtcattatctatgtcccgctgatgcagagcatgtttggtacggaagcgctgccgctgcgctactggtttgtcactctggtcatcggcgtcgccatgttcctggtggtggaagtcgagaagcgtctgacgcgccggttccgcaaaacggcctgaacaatctcgcgcgcctcgctgcaggcgcgcgttactgtcgcaaggatcctctatgattaaaaccttccgctttgctctgctggcctgcggtctggtcggcggcgccctgacggcgaccgccgcgccggcggtgccggtccgcgtcgccacggttgaactggctcctcatgctgaagaacgcgctatccccgggcgggtcgaggcgatccgcgccgtcgacattcgcgcgcgcaccgaaggggtgattgttcagcgccacttccaggacgggcagtatgttaccgaaggcgacctgctgtttaccctcgacgacgcgcagccccgcgcggcgctggctctggcgcaggccgagctgaaaagcgccgaagcctcattacgtcagtcgcagcagttgctcactcgctacgagcggcttatcaacaatcactccatcagccgcaacgacgtcgatacggcccggatgcagcgcgacgtcgccgccgctgccgtacagcaggccaaagcccgcgtcgaggcccagcagattgtgctcagctacactcagattgcggcgctggtgaccggtcgcgtgggccatagcgcctttcacgtcgggacgctggtcaattcgtccagcggcgtgctggtggacattgtgcagttggatccggtgcgggtctcgttcgccctcgacgaagccgcgtttttcagcaaaaccggccagcacgccgatatccacgctctgaagcaggcgtggctggcgcagattgaggttgatggtaaacggcgcgacggggtgttgacctctatcgataaccggatcgacgcccgcaccggcagcgtagcggtgcgggccgagttcgccaatccgcagcaccgtctgctgccgggcggcagcgtgacgatcctgttccgtccgcaggaactgccgtcgcgagtgatggtcccggccgccgccgtgcagcaggatccgcagggctttttcagctgggtgctgaagccggaccacaccgccgggcagcgtcgtctgaccctcgcggggcagcaggggcagcagtttgcggtcgagaaagggctgcaggcgggcgagcaggtgatcaccgacggcgcgcagcggttgcgcgaaggcgccgcggtgcaggtgctgaactagctaaggagaagggatgctgaccttttttatccgtcgtccgcgatttgccatggtgatcgcgctgctgctgacctttgtcggcgcggtgtcgctgaagctgatcccggtggagcagtacccggcgatcacccccccggtggtgaacgtcagcgccagctggccgggcgccagcgcgtcagacgtggcggaagccatcgccgccccgctggagacccagctcaacggcgtcgatcatatgctgtatatggagtccaccagctcggatgaggggacgtaccgcctgagcataaccttcgcggcgggcaccgatgccgacctggcggcgatcgacgtgcaaaaccgggtggcgcaggcgctggcgcagctcccggcggaggtgcagcagaatggcgtccaggtgcgcaagcgcgccagcaatctgcttatgggggtaagcctctactcgccgctgggcacactgacgccgctgtttgtcagcaactacgccagcacccaggtgcgcgaggcgctggcccgcctgcccggcgtcggcgaggtgcagatgtttggcgcccgggattacagcatgcgtatctggctgcgcccggaccgcatgaacgcgctcaacatcaccacggatgatgtcgcccaggcgctgcgcgagcaaaatgtgcagggcgcggcggggcaggtgggcaccccgccggtatttaacggccagcagcagacgctgaccatcaacgggctggggcgtctgaacgaggcggccagctttggcgagattattatccgccgcggcgcgcaggggcagctggtgcgcctcgccgacgtggcgaccattgagctgggcgcccgcagctacagctccggcgcccagctgaacggtaaagcgtcggcctatctggggatctatccgacgcccaccgccaacgccctgcaggtcgccagcgcagtgcgtgcggagcttaaccgcctgcacactcgctttccggcggatctcacctgggaggtgaagttcgataccacccgctttgtggcggcgacgatcaaagagatcggcgtctcgctggcgctgaccctgctggcggtggtcgtggtggtgtcgctgtttctgcagagctggcgggcgacgctgatcgtagtgctggcgatcccggtgtcactgatcggcacctttgcggtgctctatctgctgggctacagcgccaacaccctcagcctgttcgcgatcattctcgccctgacgatggtggtggatgacgccattgtggtggtggagaatgtggaaaccaaaatggcggaagggctggatcgcctgcaggccaccgcccaggcgctgcggcagatcgccgggccggtaatcgccacgaccctggtgctgctggcggtgtttgtgccggtggcgctgctcccggggatcgtcggcgagctgtaccggcagtttgccgtgacgctctccaccgcggtggccctgtcgagcctggtggcgctaaccctgacgccggccctctgcgcgctgctgctgcgcccgcgtcctgcccggccggcggcggtgtggcgggcgtttaaccgtcttctcgacggcacccgcgacggctatggccggctggtaggcaggatgaaccgccgtccctggctggcgctggcggcgacggtggcggcaggcgcgctggtggcgttcagcttcacctcgatgccgaaaggcttcctgccgcaggaagatcagggttacctgtttgccagcgtgcagctgccggaggcggcgtcgctggagcgtaccgaagcggtgatggcccaggcgcgcaagctgctgatggctaacccggcggtggaggatgtgattcaggtgtccgggttcaacattctcaacggcaccagcgcctctaacggcgggtttatctcggtaatgctcaaggactggcatcagcggccgccgctggatgcggtgatggcggatattcagcgccagctgctgtcgctaccggaggcgacgatcatgaccttcgcaccgccgaccctgccgggcctgggcaatgcctcggggtttgatctgcgcatcctggcgcaggccggtcagtcgtcggcggagctggagcaggtgacgcgggagatcctccaactggcgaaccagcattcgcagctgagccgggtgtttaccacctggagcagcaacgtgccgcagctgaccctgacggttgaccgcgaccgggcggcgctgctggatgtgccggtggcgcagatcttcagcagcctgcagacggcgttcggcggcacgcgcgccggcgatttcagccgtaacaatcgtgtctatcatgtggtgatgcaaaatgagatgcagtggcgcgagcgggctgagcagattagcgagctgtacgtccgcagccgcgacggcgagcgggtgcggctgagcaatctggtcaccattacgccgacggtgggggcgccgtttattcagcagtacaatcagttcccgtccgtgtcggtgagcggttcagcggccgagggggtcagcagccgcacggcgatggcggccatggagcagattttgcaggcccatctaccgccgggatatgactatgcctggagcgggatctcctggcaggagcagcagaccggtaatcaggcggtgtggatcgtgctggcggcggtggcgatggcgtggctgttcctggtggcgcagtatgagagctggacgctgccggcgagcgtcatgctctcggtgctgttcgccatcggcggagcgctgctctggctgtggaccgcgggctatgccaacgatgtgtatgttcagatagggctggtgctgctgatcgccctggcggcgaagaatgcgattctgatcgttgagttcgcccgcagccggcgcgaggaggggctgtcgatagtcgacgctgcgcgcgagggggctacccgccgcttccgcgcggtaatgatgaccgcggtgtcgtttattatcggcatcatgccgatgatgctcgccaccggcgccggggcgcagagccggcggatcatcggcaccacggtattcagcgggatgctggtggcgacgatggttggcatcctgtttatcccgtcgctgtatgtactgtttcaacgtatgcgcgagtgggcgcatcggcgggggtaagcgcggcgctaccggtcggtaacggggatactccaggctgcaacgactaccgggcggtcccctctccctttcggagaggggtagggtgagggtgggttttgcgttcacgttgcgtttgggcgtgagccccgccttatctgccgaccttcggttcgccgatttcagcgggaatcagccctgctgcacgcccgtagatttcaggagccacaccatagcgaacagactctgtaggcccggtaagcgcagtggactgcaccccaaaagttggacacccaactgagtaaggtgcaattttatggctaaaccaaagtattcccctgaaacaaaactggctgtggttaatcattatttgtccggtaaagacggagaacagagtacagccgacctttttggtattgaaagaacatctgtccgtcgctgggtcagggcatggcagttccacggtgcagaaggcctgactgcaaaaaataatcattattccgatgaatttaaactcgtggtcgtccgggcggttatcagtgaccgcctgacgatgcgtgaagcggctgcccggtttaatctctccgcagaaatacttgtccggcgctggctcgacgtgtacaacgatgccggagcggaaggtcttttaaacatacaatgcggacggcccggaaaaatgacaaagccaaaaaatatcccaccactaacagataaagagctggaaaaactctcccccgaagaactcagggccgaactgcgttatctgcgggcagagaatgcctatctaaaaaagttgaaagccttggttcagagcgaaaaaaatggcaaaaagccctgataatcagtgaactaaggcatgaacacgctctgcgggaccttctgcgggcggccggtatgtcccgtagcacgtggtattacaatatgaatgcactgaagcaaggggacaggtatgcgggtcttaaagagaacatcaggaagatataccactatcacaaaggtcgttatggctaccgcaggatcacgctcgcactgagaaaacaggggctgcggataaaccataaaacagtgcagcggctgatggcagaactgtcactccggtctgtgataagggcgaaaaaatatcgtgcctggaaagggagaacgggcgaggccgcgcccaatatcctgagccggaacttcggtgcgtcaaaagccaacgaaaaatgggtaacagatgtgacagagttcccggtacagggaaaaaagctttacctgtcgtcagttctcgatctgtttaaccgggaggttatcgcctacagcctgtcggaaaggccggtgatggagatggtgaatacgatgctggacggtgcgttcccgaagctcagaccgggagatgctccgctgctgcactcggatcagggctggcattacaggatgaggagctatcaggaacgtttaaaggcgcatgggatgacgcagagtatgtcgcgtaaaggaaactgcctggataatgcagtgatggaaaacttcttcgggaccctgaaatcggagtgtttttatctgagggagttcaggagtgtcagtgcgctaagaaaagccgtagaggactatatccattactacaacaacgagcggataagcctgaaattaaaaggcctgagtccggtagagtaccgaacccaggctctgagagccgcttaatatgaaccatccaactttatggggtcagtccagcagcgccaccgggcaaggacatcgggcacggcggcaataccttgcccggcctgtcgttaatttattcactctcctggctggaatggccgcccccaaacgcgcccgctattttctctccaccgttatcatggtcacgaacggatgatactgccacggcacgctgccgcctttgcggtacatcttcgacagggtgccgtcgagataaagcatctgccgcacgccaagctttgactgcgcatagcaggcaaaatcgtaaaagttggtctcgcgatcgctgagcataaacaccacccggccctgcttatcgataccaaccccgttgcgcagcttgcgcgaactggcggagggcttcagtcgccagttgatggcgccattttcaatcagcatcgggccggactgcaccgcatagcggatggcgggagagggtttgtacgccggcagcggcacgattttcgcccggccgttttccaccaggaatacgccgccggggcggataaagaagttcccgccgccggcggagcggtttaccggcgtcagccgtttgccgtcttcgatatacagccccagcggcgcgtaggccttatcgtaaatgccgccgttcatcgccatctgcacccggccgtcgccatcgatacccgccagcagcgaacgcagggaaccccaggctttgccgtgccgatcctgccagtacatcgcaatgcgctctttctgcgcatccacccgatagctctgcagggtcagcgtcgggtcggtgagggtacaggcggcgctggcgacggcggccaggggcagcagcgccagagggagcaggcaacgtaataacatgggcagtcctttctatagtctgcgccgagtatacccgcctcgctgccttatgccgcccaaatctcacagtgtttttgcaccagcccggaaagcgaaccgccgttggcgataaagtcgcgcatctgctgcgcctcgctttgcggcgatttcgcctggcgaaccaccgcctccagcgctgccgtcgccttcagctgatgggcgaaaggggccagccggtcggcgagctgcaggatctcctggcggatgctgcgctgctccccgctgcgcacgtcggtgagggtcccgtccagcccgtagcggcaggcctgatagcggttaaaggggtacagcagataatcatcaggctggtgcttaaaaggacgctccgtcaacagccagcaggccagggtctgaataaagccggcgatgtggatcgcctgggcaagggtcaagggggtgtccatcacccgcacctcgacggtaccaaactgcgggctggggcgaatatcccagtgcagatccttcatgctatcgatcatgctggtgtagctcagctggcggaacaggcgacgaaacccctgccagtcggccacccacggcatcggaccgttgtcgggataggaggagaagcggttcaggcgtgaacaggcgaagcggctgtcggtgctgtcaaaccacggtgaggcggcgttaagggcgatgaagtgcggtacaaagcgcgacaggccatgcagcagatagatggcgtcgtcaccgctctggcagccgacgtgcacatgctggccaaagaccgtcgcctgctgtgccagatagccaaaatgctcgacggttttgacatagcgcgggttatcgctgatttgctggcgctgccaggcatgaaaggggtgggaaccgccgccgcagatctgcagatgatggcgcagcgccgcgcgctggaccgcctgctggatggcgctgagctggatttgcgcatggctgatgtcgcggcacaccccggtggcgatctccagcatgctctcggtgatgtcgtgtttggcttctcccacggtcagctcatgctggacgtcggcaatcagcgtcgaggcatcctggctgagatcgtaacccggcgggttcaccacctgcagctccagttcgataccgagggtaaaaggatcggagcggtgaaaatcggctaaaggcatagtctctcccggtcgatgtgttccctgaagtatatacccgtcacacatttacgttggctttgctacgcagcttatccattcgcctcgcgccgcatcccgcgatattaggcgacgcgtcaggtcaattgttgcccccgttctcttcgccaacccgctggcgggcaaatttgcgcgagcccaccacgcacagcaccacgcccagcgtgaccgccagcatcaaggggctgacggtttcgtgcaacagcgccgccgacaggcctagtccgaagaacggctgcaatagctggagctggccgacggcggcgatcccgcccgcggccagccctttgtaccaaaagatgaaaccgatcagcatgctgaacagcgacacatagccgagcgccgcccaggaggaggccgagatggcatgccaggaggcgggctgaaccagcagcgaggcggggagcatcaacggcagggcaatcaccagcgcccagcagatcacctgccagccgccgagctcccgcgtcagcttcgccccttccgcatagccgaggccgcagacgataaccgccgccagcatcagcagatcgccgctgagtgaggccgccgcattttgcgtcagggcgaatcccaccaccagcaggctgcccagcagcgaaaagatccagaaagcccgccgcgggcgttcgccgccgcgcagtacgccaaagagggcggtcatcagcggcagcaggccaataaacacaatcgaatgcgccgaggtgatgcgctgcagggccagcgccgtgagtagcggaaagccgagcaccaccccggatgagacgatgatcagggacacaagctgcgccaggcgcgggcgtttctggcgaaagcccaccagcagcgcgatggcaagcagcccggcgatagaggcgcgcagaaaggtcaataacaacggatccatatcctgcaccgccagccgcgtcgcgggcagcgaaccgctgaaaatgatcacccccagtaaaccatgaagccatccggaccagggaccgggcgccgatttatccattgctgaatctaccacgttaacctcgcgttatctgattgggctgcgcccgcttgagcatcgtcagcggcgatggtaatgtggccaatctaatacaatcaaattattgtcatagatacatttcacgatgaaagcccgatataaagccgttgtcgaccgatatgcgcaggcgatccgcagcgggcagctgcccgccggcagccgtctgccgacgcaccgtacccttgccgccggggagcgcatctcgctggccaccgccacgcgcgtctaccgtgaactggaagagatggggctggtcagcggcgaaaccggccgcggcaccttcgtgcgcgacctctcgctgcctccggggcacggggtcgatcagcaggtggtcgccgccgatgtcgtggatctcaatttcaactacccttcgctgccggagcagggcgatgcgctgcgcgaggcgctcaggcagctggcgatggcgggcgatattgactcgcatctgcgctatcagcctcatgcagggcggctcgccgagcgggacattatcgtccgccatttgacctgccagcactttgcgccggacgcggaaaatgtcctgatcgtcaacggcgcacagcacgggctggcggtgaccgtcatggggctgttacgtccgggggatgtggtggcggtggatgcgctgacctattcgggcttcaaaattctggcggcgctgtatcatctggagctggcggcgatcccctgtcggccggagggaccggacctgcgggcgcttcagacgctgtgccagcagcggcgggtgcgggcggtgtataccatgccgacgctgcacaatccgctgggctgggtgctcaacaccggtcagcggcaggcgctggccgatcttgcgcgccagcacgatctgctgattattgaagatgccgcctatgcccggctggtgagccgtccgccgccgccggtggtcagctatgcgccggaaagaacggtgtatgtcaccggattttcaaaaaatatcgccaccggactgcgcgtgggggtggtgatttctccgccgcgctatcgcccggagattgagcgcgccatccgggccacgacgtggaatacgccgacgctgacaagttcgctgatctgcgcctggattgaagatggcacggtggcgcgctttgaaacgcagaaacgccaggatgcgcgacagcggcagcaggtggcccgcgaggtgctttgtgggcttcccgtcgtcagtcatcccgattcgtacttcgtctggctgccgctgggtgaagagagccgggccgatcggctggcgaatgcgctgatggaacgccgcatttcggtatcgaccgccgagccgttctgcgtctccgccacgatcccgcaggcgctgcgcattgcgctcggatcggtgcctttcgacagcctgcgcccggcgctgctcagcgtgcgcgacgccgttgagtatgaacaataccgctaacccatctgctccagctggccgcgcaggacctccaccccctgggcgatggcgtcagggttaatggcgtggaatcccatgcgaaaatagttatccggcggcgcggcgttaagaaaatggcgcgccccgggctcaatcagcacgccggcgtgggcggcgcgccaggtgagctgctgggtgttgatctgcgccggggtctgcagccagaaggcgttagcatgttcgctccccgccagcgcgcgacacgacggcagatagcgctgcagggcggcgtgcagacgctcccagcgctgggcggagtcatagtggtagcgccgcagatgggtctcataatggccctgtgcaaggaagtgggccatctggtactgaatgttggtcggcggatggcgatagaccagccggcgcagggcgcgcgcctcgtcgatcaggtccgggtcggcgaccataaaccccaaccgcagccccggtgacagcgcttttgacaggctgctgacatacaccacccggccgctgcgatcgctggccttcagcgccggcagcgggttgagggtaaagttactctccgagtcataatcatcttcaataatgaccgcgtcatggcgggcggcatgctccagcaactggcgacgccgcgcactgctcatggtcaccccggtgggcacctgatgacctggagtgacatagtagtaatcgcagggacgctcattaagcacgatcccctcttcatccaccgggtgcggcaccacctcggcgtcggcgagcagaaaggtgttgatggcttcgcggaagcaggggttttcgacgccaatgcgggtggtggaagagagcagcagtcgggtcagcaggtagagggcattttgcgagccaagggtgatgagaatttcatccggcgcggcgacaatgccccgcttgggcagcacccgggtgcggatctgctcgatcagcatcggcacatcctggtcaatatggtcgatgacccacgccgggtcgcgcaccccgccgtgcagccagttcgccgccgagcgccaggtggccagcgggaattgccgggtatcgggctggccgtagataaacgggtagcggtagtgcatccagcccgccggtttgaggatcgactcctgctggctgggggtcatctgcagccggtcgccccagcgtggtgcagccgcttcgcgctgcggtgcactctcgacggcggcaggcgaagcttcatgatagtcgggatgcaggtagtaaccgctgcgtgggcggctaatcaggtagccctcgttgaccagactttcgaacaccagcgcgctggtgttacgcgagacgcgaagctggctggccagctggcgacaggagggcagcggggtgtcggcggcgaagatcccgctgagaatggcattcaccagcgtctctcgcacctgttcctgcaaaccgcggccaggctgaaaatcaacgtgtaacaggtgacggatcatacggggctcctctggcaataacgcattgcgaccacccgttacactcagcaaattccataccaccctgccgccatctgacacagcgatgcggcccatctggctctatacggaattgaaaaacgctcccacattaaaaacgtattcagccgccgtggaccggaacgtccccggccactattttgcagaaaccttttcgcgttctggaatgaacccgtctggccaatccatcaggggtgaaataatgaaaaaatcattggcatcaatgtgtctgagcgctgtattaacggtcgctttttcttatcacgccgtcgcggccgatcttccggaaatagaaaagtccggcaccctgaaagtggcgacggaagatgattatgcgccgtttaactttatgaataatggccaggctgatggctttaacaaagatatgcttgaggaattacgtaagtacgccaaattccatgtcgaccagagcatattaccgtggaccggattattagcggctgtctccaccgggcaatacgatatggccttaaccggggcggttattaccgatgagcggctgaaggtctttgatttcaccccaccgtgggcctccgcacagcactatttcgtcaaacgcgctggcgatacctcgctaaataccattgccgatctcagcggcaaaaaagtggggttacaggccgggagcgcgctgctggcgcgtttgccggagctgaaggcgatgctggagaagaccggcggcaagctgggaccggtggtggagtatccctcctatccggaagcctacgccgacctggcgaacaagcgactggattacgtgattaacgtggtgatctcggtaaacgacctggcgaaagccaaaccgaaggtcttcgccaaagggctggccgtctccggaccggggtatatggcgtggccgatcccgaaaaactcgccgcagctgctggcctatatgaccaagtttatgaaccacatgaaggagaccggcaagctcgccgagctgcagaaaaaatggttcggcgaaacctatgacaacctgccgaccgaggcgatcaccagcccggaacagtttcacaaactcgccggactgtaatattccgcggcgggcgaccgccgcctgttgttgagaaggagggcctcatggatgcaatttcctggcagttattaatcgaaggcgcatggacgaccctctggatttcggccatcgctatcgccttcggggtggtggctggcctgctgatcgccctggtacggatgctgcgcctgccggtgatcgaccagctgctggtggtctatatcagtctggcccgtgcgacgccgctggtgacgctggtgctatttctgttcctttccttgcccacgatgggcattaacctcgacaagaacgtggccgccatcgtggcgctgacgcttaacacgtcggcgtttaacgctgagatctggcgcaatgccttccgcacctttccgcgcgaacagcgggaggcggcggagtcggtagggatgcgccgctggacctacttccgctacatcatgctgccgcagatgtggatcgagagcctgccggcgctggtcaatgagatgtcctttttgatcaaaggtagccccgcgatcgccgtgattggcgtggtggatctcacccgggtcaccaaccgtatctcctcggtcacctacgagccgctgtcgccgatcctcgccgccggcctgctgtatgtggcgatcatcggctgtttgttgaagctgcagggtatcgcggaacgtaaagccaggcgtctggcgcgctaggaacgggaggcattatgaatcagtggggcgttatctggtcggttcgcgatagctttattgccgggttattcgcgaccctcgaactgtttattaccgccgccctggcggcgctgattatcggtattgcgctgtgttattttagcgaatatcaaaagaaagtgattaaccggattattattggtttcgtcagcctgatgcgcgcgatcccttttttgatcctcgcttatcttctgtattacggactgccgcagctcggtattagcatggagccgtggaccgccggtttactggccctgattatttatcatggcgcctatttctttgaaatattgcgcagccagcggcgggtattttccggcggatatattgaagcggcgattgctcagggcttttctcgctatgccatttttcggcggattattttacccaatatcgtctcttccgccttaccgctgatcggcaatcagctgattatttgcctgaaggacaccgctttcctgagcattattaccgttcaggagatcaccgccgccgccaacagcgtccaggcgacctattttattccgtttaacgcctttatcgtcgccattgggctttactgggcgatcagcattctgctggagctgctgattaagcgcctgaccgcctggggagccaaaagaggaatgagccatgcctgagtctattgccgtaagcgtcaaaaacgtctccaaacagttcgataatgtggaagtcctgcgggatattaacctgacggtggagaaggggaccgtggtgagtattctcggctcgtccgggtcgggaaaatccaccctgctgcgctgtatgaactggctggaacagccggaccgcggtgaaattcatatcggcggtcagcggctggggattgatgaacagcgcggccgggcgatgtcgcaccgccagctggccaaaatccgcgagcgggtggggatggtctttcagagttttaacctgtggccgcacctgaccgtgcagcagaacgtcagcgaggcgctgctgcgcgttaagggcatgaaacgagacgaggcgaaggccatggccatgcagcagctggagaaagtcggcatggcgcacaaagccgatgtctacccgatcactctctccggcgggcagaagcagcgggtggcgatcgcccgttcgctggcgatgtcgccggaagttatcctcttcgatgaaccgacctcggcgctggatccggagctggttaatgaggtgttgggggtaatgaaagcccttgccgccgagggctacaccatggtggtggtgacccacgagatggattttgcccgccaggtgtccaatgaggtggtgtttctggagaagggactgctgattgagaaggcgccgccggagaagttcttcactcagcctgactccgaacgcgtcaggcagtttctgcaaagcagccgttagtccggcctgcatcccctgccggtatcgccgacaggggatgcgtcgggtttcgcttaatcccggtcgatagcgaacggctgccacgcctgacgcaccggcatcacctccacccggttaatgttcatatgcgccggcagcgtggcgatataaaacatctgctcggcgatatcgctcgcgctcagcggcgtggtgccgcgatagagcttatccgatgccgcctggtcgcctttggttcgcaccagggtaaattcggtctcggcaatccccggcgccagatcggtgacccgcacgccggtgccaagcagatcgcagcgcaggttatagctgaactgcttcacaaacgccttgctggcgccatacacatggctgccgggatagggccactgcccggcgatcgagccgatattgataatactcgccccggcgccatggcggatcagcgtcggcagcagggcgtgagtgactgtcaccagaccggtgacgttggtgtcgatcatcgttttccagtcctccagcgccacctcctgcgccggcagcggcgacagcgccagcccggcgttgttgatcagggtggtgatatcggcgaaatcggcgggcagcgacgccacggcggcagccaccgcctcgctgtcacgaacgtcaagctcaataatatgcaccggcaccctggcggcgagtctgtcctgcaaggccttcagtcgcggatagcggcgcccgctcagcaccagcgaccagcccgcgtcggcaaacacctgcgctgccgcttcgccaaaacccgaggtcgccccggtgataaacactacgttgctcgttgccatctcattctcctgtgcggttgtcccttcactataaaaacgccggacgacaaggcacagggccagacgacgggcggggatgtgacaccgtgtcacatcgttatgcgcgcactggctctatccgatttgcgcggccaaggccaatgatgaagccaaccactacgacatgagagagggcagggtatgaagctggcaattcacaacgaggtcgcggtaagcaatgacgaagttcggcaattagatcgcgcctatgtgtttcattcatggtcgatgcagggcaatctcaacccgctggtcatcgccggggcgcaaggctgcgagctatgggattatgaggggaacacctggctcgatttcagcagccagctggtgaacgtcaacattggctatcagcacccccgggtactggcggccatgaaggcgcagctggagaccctggtcaccatcgcgcccgccaccgccaaccttgcccgcggagaagcggcgaagcgcatcgtcgacctggcgccggcgggcttcagtaaggtgttcttcactaacgccggggcggatgccaatgagaacgcgattcgcatggcgcggctctataccgggcgcgacaaggtgctgtcggcctatcgttcctatcatggcaacaccggcagcgcgatcgccgctaccggcgactggcgccgggtgccgaatgagttctcccgcggccacgttcacttcttcaacccctacctttaccgcagcgagttcaacgccgcgactgaggaagaggagtgccagcgcgcgctggcgcatctgcggcggatcattgaatgcgaggggccgacggccatcgcggcgatcctgctggagtccatccccggcaccgccgggatcctcgtgccgccggcaggctatatgcagagcgtgcgcgccctggccgacgagtttggcatcgtgctgatcctcgatgaggtgatggccggctttggccgcaccggcagctggttcgccttcgagcaggatggcgtggtgccggatctggtgacctttgccaagggggttaacgccggctacgtgccggcgggcggggtgctgattagcgagccgattgcccgctactttgacgaccacttctttgccggggggctgacctactccggccatccgctggcgatggcggcgattgtcgccaccatcgacgcgatgaaagaggagaaggtggttgagaacgcggcctctatcggcaacgaggtgctgcgccccggtctcgaggcgctggcggagaagcacgccattatcggcgaggtgcgcggtcgcggcctgttccaggcgctggagctggtgagcagccgtgaacaaaaaacgccgctgaccgccgccgacatggccgcgatcaaaggggccctgaccgaagccgggctgctggcctttgtggtggagaaccgcattcacgtggtgccgccgtgcaccattactgctgagcaggtggcgcaagggctggcgatttttgatgcggtcttcgctcgctttgccagtctggcgaagtaggggagggggccggatactgttgcccggcggcgcgcttgccgggcctacggggtgtgagcctgtgagtggatcctgtaggccgggtaaggcgcagccgccacccggcgaaatcaaggataccgtgcctgatatcttgcccggcggcgctgcgcttgcacgggcttaaacgccagccggacggttccctctccctccgggagagggccagggtgaggggaagcactgcagtgtggttgtttatgttatcggtggcttcagcgtagtttgcgctcccggttaatcgcctgcgttatgtcactcctggcgcagggagcgcacagggggcggccagtcgccgccgccccctgtacccccgggctccggccagcaacatcgccgctgcgcggtgccttcgacttatccctgcaggcttcgggtcgggccgaggcagcgtccgtgcaaaacacggccctcagcccgcatccatgcgggctgccccggccttccgggaacgtctcagcgatgttgaggccgccagccccggcagtttcagcagccccagcgccagtggtgatttggggctgtaggccgggtaaggcgcagccgccacccggcgaaatcaaggataccgtgcctgatatcttgcccggcggcgctgcgcttgcacgggcctacggggtgtgagcctgtgagtggatcctgtaggtcggataagcgaagcgccacccgacaaaacaaccgcgcatccgctggcctcacctcatccggtgctctccgttgaccaacgcttcgcgatcgaaaaagcgctggatcacgccctccgccataaacgccgcccgatcggacatatgggcgatgacgtcggcatcgtggctgaccagcagataggtcatgccgtgctcctgtttcaggtgattaagcaaattgagaatttccgcctgcaccgacatatccagcgccgaggtcggctcatccagcagcaggatctgcgggcgcagcagcagggcgcgggcaatggccacgcgctgccgttgcccgccggagagctggtgtggatagcggcggacggcgtcggcggccagccccacctgctcaagggcggtggttactcgcggggcaacgtcgcggatgccgtggatctgcagcggctccgccagggtgcgccacagggtatggttgggatgcagcgaggcgtacggatcctgaaacaccatctgcacgttgcgccgcagatcgccctgaaagcgggcgcccggcataatggcctggccgagcagatccacgctgccgcgccattcgcgctgcaatccggccagcacgcgcaaaatcgtcgatttgccgcagcccgaggcgccgatcaggctgaaggtttccccggcgtcgacacggaaactggcggcggagaccgccgtcttcgcgccgaatgtaacctgtaaatcctgaagattaacgatcgccatgggctgtctccgtaaagtcctgggttctgtcgagggtcggcagcatctggccgtaggtatgcgcacttggccggcaggtccacagggtgcgggtgtaagggtgcgtcgcgctcggcagcgcccgcgccggcatctcgtcgacctgtcttccctggtacatcaccagcacgcgatcgcaatgcgcggctaccagcggtagatcgtggctgatcagtaacatggccatctgccgctgcgcgcactgctccaccagcagctcgaggatctggttgcgcaggcgggcgtcgagggccgaagttggctcgtcggctatcagcaccttcgggttattgagcagcgcgagggcgatcatcacccgctgtcccatcccgccggagagttcgccgggatagcggctgaggaccggcagatccagaccgacggcggcgatggcgtctttgaccgcctcggcgcgcgcgcggcggctcagacgctgatgcagggttaacgcctcttccagctgcgtctgaatggactgcaccggattcagcgcatagcgcggatcctgcagcaccatggcgatatcgttgccgcgcagttcgcgccagccgcgagcgctgagggtcagcacatcgcgccccagcacctccagccgttcggcgctcaccaccccgggcttgcgcaccaggcccatcagcgcccgggcggtcatcgatttgccggagccagattcgcccaccagcgccagccgctcgttgccgagggtgaagctgacgttgtccaccacccgggcggtgggatagtcgacggcgagtccctggacggtcagtcggatgtcagtcatgttgcggctccagaatatcgcgcaggccatcgcccagcaggttaaacgccaggctggcgagcaggatcgccgcgccggggatggcggcgatccaccattggtcgaaaatcacctgcatcccgtcggcaatcatcgctccccactccgccatcggcgggcgggcgcccaggccgagaaaaccgagcccggcggcggcaaggataatacccgccagatcgagcgccagccgaacaatcgccgacggcagacacagcggcagaatatggccgatcagcagccgcccgccgcggatgcccagcatctccgccgcggcgaggtagtcgctatggcgcaggcgctgaatttcgctgcgcgcctgacgggcgtaggccggccaggtggtcagggctaacgccagcgcgccattgaccagccccgggccgagcatcgccacgaacgcgaaggcgaggatcaggcgcggcatcgacatcaccacgtcggtaaagcgcatcagtatccgctccagccacccgccatagtaaccggagaggatacctaccagcagcccgacgggcagggtaatggcggtcaccagcgccaccagacccagcgccgggcgggcgccgtagagcaagcgcgacagcaggtcgcggccgtagctgtctgtgccgagccagtgtcccgccccgggcccctgcagacgagcggcggcatcctgccagttgggatcgtgcggcgccagccacggggcaaacagcgcggtcagtaccagcaggatcaccagggtcaggccgctgaaggcggcgggtgagcggcgcagacggcgtaaaaacagataagtcggcatcagcgcaccctcggatcggttaaccgtaccagcagatcggtcaggttattgatcagcacaaaactcacgccgatcagcagcgtgccgcccatgatcgccgtggtatccccggcgaacagcgccgtggtgagatagcggccgatccccggccacgagaagacggtttcggtgagcaccgccccttcgagcatggaggtccaggcgagagcggtcaccgtcagcagagtgccgcggatattgggcaggacgtggcgcagcagaatcgtcatctctccggcccctttggcccgcgccagcagaatgtactctttgttcatctcgctcaggcaggcggagcgggtcaggcgggtgatgctcgccagcgagtaataggccagcaccagcaccggcagcgccagatggccgatcgcatttttaaacgccgcggtatcgccggagagccaggtgtcgatcagcgcaaaaccgctgcgtggctcgacggtgtactgataaatatcgtcgaggcgacccgggcccagcgcccactgcagccgggcgtaaaacagggccagcatcagcaggccgagccagaaaatgggcaccgagttgcccaacagggtaaaggtgcgaaccgccagatcccacggcgaaccggcgtaacgggcgcacagcaccccggcgacgatgcccagtaccgcgccgacgatcagcgccagggtcgccagctcaagggtcgccggaaagaccgccagcaggtcgtggagcaccggctggccggtagcgctggcgatgccaagatcgccatgggccaggttgaccaggtagtgccagaactgcaccggcagcggctggtcgagacccagctgatggcgaacctggtcataggtcgactggctggcatggtcgccgacgatctgcagtacgcggtcgacgggcgacagcgcggagagcgagaaggtgaccagcaacagcccgaacagcgtgagcagcagcgtaaacagcccctgcagcaggcgggtaaggtgagtggaaaacgatggcatggagaatggaaattcctggtatatcagcattgtacccggcggcgcgatgccgaccgggcccgggtgaggagtcggtcatccgggcagacaaggccgccgtacccggtgacaaaacccgcttacttggtcacgttatcgtaccagaccatgtcggcgttcagtccctgctgatagcccttcacgttgtcacgcaccacgatctgggttttcccctggtcaataaagacgtacggcgaatgctggagcagggtttcctgcatcgttttgtacaggtcgaggcgtttcgccgggtccggctccgccaccgcggcgagggtggctttattcagctcagggatctgccagccgttgagcccggccacggtgctggatttaccatcgttccaggcaaaggcgctggcattggagtgggcatcaaagtagtctgggatccacaggcggatcgccgcctggtgctgcttcgcgcgcacccgggcatagacctggctgccggcggcgggtagcagatccaccttcaccccgccctgggcaaagctggcctgcagcgattgggcgatggtgataaagggcggtttgttctccacatcgagggtgaagtgggcatccttaatgcccgctttatcaaggatagccttagctttttgcgggtcaaaggtgaacggattagtctccagcgcccccggcaggccggccggcaggaagctttggtgaataaagtactggcctttcagcagatttttggtgatgccctcataatcaaccagccagcgcgccgcctcccagaaggccgggttattgagcagcgggttggcgctgttggcggtattaaacaccaggtagttctgctcggcggacgggatgctcagcaccttcacgccgggtttatcctgcagagcggcaatctggtcagcgccgagatcgcgcgccacgtcggcatcgccctgctggatcagcaggcggcgggaagccgggtcggggacgtttttaataatgatgctcttgatcttcggcgcgccggttggggagctggcgttggcctccagcacgatggcctgatgcggctggtagacgcgcattttataggccccgctgcccgccgagtgcatcttcagccagtcgttgccgaagtcgttatttttcgcgttcggcgccacctgtttttcatccacgatagaggcgatgggggtggagagaatattcagcgccaccgccgggctgacgtcggcggtccagtgcagcgtcagggtatggtcatcaacctttttcagctggctggcgatgttgtccggctgccagccgagcacgttgagaataaacgccggcgatttattcagcgtcaccgcgcgggtgtaagagaaaatcacatcttccgggcgcagcggattaccggaggcgaatttggcatccggcttcagtttaatggtcagggttttcgccgccggatcggcctgccagctttcggcgaggatcggtacgattttttcagggttgttgcggtccggctgcaccagacgctgatagaggctggggaccgtctgaatgctggagagttcgttagcttccgccgggtcgaggctgacgatatcgtcgagaccctgggcgaccaccagcgtgttgggcggcgtggcggcatgcgcggcggcggagaacgccgatagtagcagtaaaggcaacagttttttggtcatgtgcaatccctgaagaatggttattttattgttttatgcctcgctacgttaggccgcttgccataaggcgtaaagtcaaaataaggatatccttatgctaaaaacgcatattcaagaacgacaggttattgccggtcgcgcagaagcgcctttctccgctgcggggttcttgctataacgcattgtctattgcgaggaggtgggtgtgccggaaattaatgagtatggccagcaggtgaacgacctggtccctggctggcagggggcgcaagtcctgcggcggacggcgttaaatggccgtttttgccgcctggagccgctggacgttgaccgtcatgcggcggatctgtttgccgcctatgcgctcggcgacaacagcgactggacgtggctggcgtctacgcggccggagagcgtggcggcgaccgcccactggatcgcgggcaaggtgaatgatgatgccctggtgccgtatgcggtggttgacctgcgtagcgagcaggcggtgggcatcgtcagctatatggcgatcgagcgggaaatgggcacggttgagatcggccatgtcacctggtcgcgacggatgaaaaacaccccgctgggtaccgaagcggtctggctgctgctcaaaaacggctttgaccatggctatcgtcggctggagtggaaatgcgattcgatgaatgtcgcctcgcgccgcgccgccgagcggctgggctttagctgggaaggacgtctgcggcagaggctggtgcgtaaagggcggacgcgcgacagcgatatgctgtccatcatcgacggcgagtggcctgcgcgcgatgcggcgctgcgggcgtggctggcggcggagaactttactgccgacggtcagcagattaagcgcctggaggcgtttcgctaacatcaacctatggggtcaaaacccggaacggcaccccggtcgcgctgcgcttaccggggctacgttacatcgcctcagggtaggccgggcaaggcgtagtcgccgcccggcattgacctgttagcggcgaaccggcgcgtcgccagcgacataatacgtcgcggtgctgcgcggcagcggctggcggccgcgaatggcgtcggccatcttctcgccgatcataatggtggtggcgttgaggttgccggtgatgatctgcggcatgatcgaggcgtcgaccacccgcaatccttccagaccgtggacgcggccctcgccatcgaccaccgccatctcgtcgtaacccatcttacaggtcccgcacgggtggaacgcggtctcggcgtggttgcgcacaaactcatccagttcggcatcgctctggcattctattcccggactgatttcgcggccgcgatacttatccagcgccggctggttcatgatctcccgggtaatgcggatggcgtcgcggaactcctgccagtcctgctcatgggacatatagttaaacaggatcgccggatgggcgtgcgggtcgcgcgacttcaggcgcacgtggccgcggctgggcgaacgcatcgagccgacgtggcactggaagccgtgctctttcaccgcgttggagccattgtagttaatcgccaccggcaggaagtggtactgaatgttcggccaggcgaattctgcgcggctgcggataaaaccgcccgcttcgaactggttgctggcgccgatgccggtgccgccgaacagccactcggcgccgatcttcggctggttccaccactgtagcgccgggtagagcgataccggctctttgcactcgtactgcagatacatctccagatggtcctgcaggttctcacccacgccggggagatcgtgcaccaccgggatatcgaactgcctgagcagctccgggttacccacgccggagcgctgcaggatctgcggcgaggcaatcgccccggcgcacagcagcacctctttgttggccgtcgcttttgacgggatcgtgctctctccctccagccactcgacgcccaccgcgcgcttgccggcaaaaataatgtgatcggtcagcgcatgggtgcggatggtcaggttcgggcgaccgcgcgcctggtcgagatagccgcgggcggtgctggcgcgacggccctgcggcgtcacggtgcggtccatcgggccaaagccttcctgctggtagccgttgagatcgtcggtacgcggatagcccgcctgcaccccggcttcaaccatcgcctcgaagagcggattattgcccggcttcggcgtcgtcacgctcaccgggccatcgccgccgtggtagtcgttaggcccgatatcgcgggtttccgctttccggtagtagggcaggcagtcgagatagctccagtgttccagacccggctctttggcccagttgtccagatccatcgcgttaccgcgaatgtagcacatgccgttgatcagcgaggagccgccgagccctttgccgcgtccgcactccatgcggcgattgttcatgtacggctccggttcggtttcgtaggcccagttgtagcgcttgccctgcagcggataagccagcgcggcgggcatctgggtgcggaaatcgaaccggtagtcagggccgccggcttccagcagcaggacggtggtgtttggatcttcagtcagtcgtgttgccagaacgttgccggcggagccggcaccaataatgatgtagtcaaattgcaaaaaaacctcccggttaaaatatggactggaatttacccatctcaacctggatggacttcacctgggtgtaactctgcagcgtcatcacgccgttctcgcggccaatgccggagtgtttgtagccgccaaccggcatttccgccggggattccccccagctgttgatccagcagatgccggcttccagctggtggataattcggtgagcgcggttgaggttgggcgtcaccacgccggcggcgaggccgtattcggtggcgttggcgcggcgaatgacctccgcttcgtcggcatagctgaggatcgacatcaccgggccgaagatctcttcgcgcacgatggtcatctcgtcgctgcaatcggtaaacaccgtcggggcgacccacgcgccgttatcgaaaccgtcgcctttcagcgcctcgccgccgcacagcaggcgcgcgccttcgcgtttgccgctctcgatatagcgcagaacgttgtcgcgatgggggaagctgaccagcgggccgaagttggtgtcatcggcaaacagatcgccggggcggatgcgggccacccgctcgaggatcttgtgctcgaattccgccttctgtttcgccgggacaaacacccgggtgccgttggtgcacacctgaccggagctgtagaagttggccatcatggcaatatcggcggcgaggtcgaggtcggcatcatcggcgataatcagcggcgatttgccgcccagctccatggtgacctctttcagtgatgaagcggccgagttggccatcacttttttgccgctggcgacgccgccggtgaaggagattttggcgatgtccggatgctcggtcagatactggccggtttccgcgccgatccctggcaggacgttaaacaccccgtccggcaggcccgcttcgctgtaaatttccgccagcttgagggcggtcagcggggtgacttcgctcggtttgaaaatcatcgcattgccagcggccagcgctggcgccgatttccacagggcgatctggatcgggtagttccacgcgccgatcccggctaccacccccagcggttcgcgacgggtgtagacgaaggaactgtcgcgcagcgggatctggctgccttccagcgccgggatcaatccggcgtaatattccagcacgtcggcgccggtgacgatatcaacggcggcggtttcgctgaggggtttcccggtatccagggtctccagtcgcgccagctcgtcgttgcgctggcgcagaaggtcgacggcgcgacgcaggatgcgcgagcgttccatggcggtcatcgccgcccagattttttgcccacgctgcgcgctctcgacggcgcggtcgacatcctcgcgtccggcagcctgaacggtcgccagcacctcgccagtggcagggttgatggtctcgaaggtgcgaccgctggtggccgatgtataaccaccattaatataaagctgctgttctgccattcgggacataacgcctcctcggttatgggttcggtaaatgctgacgaataaagtggctggtcagcgactgcgccagcgttttatccagcggtttgccgctgagcgccgcccgcagccacaggccgtctatcagcgccgccagcccgtagccggcctcctgcgcctgctcgcgcggcagctcgcggcggaattcgtacaccagattcgacagcaggcgacggctgctgacctgctgtaaccgataaagcatcggctggtgcatgctgctggcccaaaaggccagccaggccttcatcgccgcgctgctgatctgcgtctcatcaaagttgccgccgacaatcgcctgcaggcgctggctggcgctgccgtccggcagagcgtgcagacggttgagcaccgcgtcgcgcagctggctggtgatgtcgcgcatggtcgcctccagcagaccatttttgtctttgaaatagtgactgatgatccccgtcgatacgcccgcccgccgggcaatctgcgcgatggtcgcgtcgtgcattccgacttcatttattgcgtccagcgtggcgtcgatcagctgcctgcgccggatcggctgcatccccagtttgggcatttttgccactccattcatcagcgttggttaactattaaagcggtttttgattggacgttcaatataaaatgtgtcttaattgttgcggatttggattttaatagttacaaaaacagtggggatactggatgacagatctttcgcaaagcagagaaaaggacaaaatcaatccggtggttttttatacctcggccggactgattttgttgttttccctgatgacgatcttttttcgcgatttttctgccgagtggattgggcgcaccctggactgggtgtcgaaaaccttcggctggtactatctgctggcggcgacgctgtatatcgtcttcgtcgtctgcattgcctgctcgcgcttcggctcagtgaagctcgggccggagcagtcaaagcccgagttcagcctgctgagctgggcggcgatgctgttcgccgccggcatcggcatcgacctgatgttcttctcagtcgccgagccggtgacgcaatatatgcagccgccggaaggggcggggcagaccatcgaggcggcgcgccaggcgatggtctggaccctgtttcactatggcttaaccggatggtcaatgtatgccctgatgggcatggcgctgggatactttagctatcgttataatttgccgctcaccatccgctcggcgctgtacccgatttttggcaaacggatcaatgggcccatcggccacagcgtcgatattgcggcggtgatcggcaccatcttcggcatcgccaccaccctcggtatcggcgtcgtgcagctcaactacggtctgagcgtgctgttcgatattccggactcgctggcggcgaaagcggccctgattgcgctgtcggtgatcatcgccaccatctcggtcacctccggggtggacaagggcatccgcgtgctctccgaactgaacgtcgccctcgcgctggggctgatcctgttcgtgctgttcatgggcgatacctccttcctgctcaatgcgttagtgctcaacgtcggcgactacgtcaatcgctttatgggcatgacgctgaacagcttcgccttcgaccggccggtagaatggatgaacaactggacgctctttttctgggcgtggtgggtggcctggtcgccgtttgtgggcctgttcctggcgcgcatttcgcgcgggcgcaccatccgccagtttgtgatgggcaccctgattattcccttcacctttaccctgctgtggctgtcggtgttcggcaacagcgcgctgtatgagatcatccacggcgacgcggcctttgcccaggaggcgatggcccacccggagcgcggcttctacagcctgctggcgcagtatccggcgtttacctttagcgcgtcggtggcgaccatcaccggtctgctgttttacgttacctccgccgactccggcgcgctggtgctggggaatttcacctcgaagctgaaggacatcaacagcgacgccccgaactggctgcgcatcttctggtcggtggccatcggtctgttgaccctcgggatgctgatgaccaacggcatctcggcgctgcagaacaccacggtgatcatggggctgccgttcagctttgtgattttcttcgtgatggccggactgtataaatctctgaaagtggaagattaccgccgggtcagcgccagccgcgacaccgccccgcgcccgatgggcctccaggatcgtctgagctggaagaagcgcctgtcgcggctgatgaattaccccggcacgcgctataccaaactgatgatggagacggtgtgctacccggcgatggaggaggtggcccaggagctgcggctgcgcggcgccgcggtggaactgaagagcctgccgccggaagagggtgagaaccttggccacctcgatctgctggtgcacatgggcgacgagcagaattttatctacaagatctggccgcagcagtactcggtgccgggctttacctatcgggcgcgcagcgggaaatccacctattaccggctggagaccttcctgctggagggcagtcagggtaacgacctgatggactacagcaaagagcaggtgatcaccgatattctcgaccagtacgagcggcacctgaactttatccatctgcatcgggaagcgccggggaacagcgtgatgttcccggatggctaatcagggaagcccccgtcggggaaaggctgacgggggcgaaggtcgttactggtagttaaaggcgtccggatggttgtcgaggctgccgctgagggcggcaaacagcacggttttgccatcgatggacagggcatcgctgacgttaagccaggtcagcctctcctggtcggttttttcatcgaccaccgagtaaacgccggacatctgtttgcttttttccgaccagatcaccgcgatacgttcatggccgcagtcgtggggtttgcaggcgcttaacacctgccaggattcgctacccagtttcaccgtctgcgcgggcgaaccggtgccgccggtggtcacccaggcgggcagctgatggcctttgaccatctggttaaacgacgtccgggtggcggcatcgtgagccagactgttcagcgtgacatcgccttgcgccataacgctggcggaggcggctaaggcgacgatagcggtaagagctttaaacatgtttcctcctggacttattccgtcctcataacaagcctctttatagtgagcgtagagaatgattaatgcaaactctgacatattttctgtgaatgattagaagcggtgcgcgcatggacgttacgctaagcgatatgccatgatgcggattgatttattttccaaatatatgcccttgggataaagcagttagcgaagtggcatagttattcaggcgataaagcatggcgtatgtgaatcatctactgacgtttattgagagtaatccggcgctggcggtggggtttaatcttattctgctgctgctctccggcatatttgcccatcttttatgcaagttcttgctgattaaagtggtgcgtaaggtcttctttagtagccacaaacaggatgtgccgctggagaaggatcgacgcatcgccgaaaagctgtccaatttcattccggttattatcgtctattacgttctgcagtttatgccggcgatgccggcatcgctggtgacggcgattaatactatctgcgggatcttgttttttatttttatgtcggtgtttttcaacgagatgctggatattgtcaacagctcctatctgcgaaagaccaaacgtaaaaatcattccattaagggctatatccagataggcaaaatcttagtccacatcctggcggcgattatgatcctcgccgtgatgtcgaacaaatcgccgatcattattatctccagcctgggggccgtggcggcggtactgatgatcgtgttccagcatactctgctgtcgctggtggcgaacgttcagctgtcgtccaacgacgtgctccagctgggggactggattgaaatgcctgacaagaacctcagcggtgaggtgacggatatcgcgctgcacaccattaccatccgtaactgggacaataccatctcccgtatcccgaccaagaatttcctcaccgagacctataccaactggcaggcgatgttctcctccggggcgcggcggatcatgcgcagtatcgccatcgatcaacactcggtgcgttttctcgaccaggagatgctctcctcgatgctgaccatccgcggggtgagtgagcctctggcgacgctgcttgacggccgggatcccggcggcgtggccgaccgctggtttatcgataacgggctgaccaacctgaccctgtttcgccactatctgatgcactatctcgccgagcggccggatattattaaggagatgtacattgtggcgagaacgctgaaaccttcgccgtcgggcatcccgctggagatttactgcttcaccacctcaacgctatggaaagactacgaaaacacccagtcggcgatatttgagtacattaccgcggtggccggacagttttccctgcgcctctatcagtatcccgccgggcacgatttctggcgtctctcccaggagcacgccgcccggacgggcctgccgccgtcggccgaaggctaaacgctgatctgctggcgccagagggcgatctcctcctccagccaggcgatgaaccgggcgacttccggccggttctccgcctgcggggagacggttagccagtagtgccaggggtaggggacggtgacggcggtgagctgcaccagctcgccgcgggctatcgcccccgccaccagggagcgccgctccagcgccacgccggcccccaggcggaccgcctccagcaccagattggagtcgttcaggcgcaggcccgcggggacgatcggcttttccagccccgcctggctgcaccaggcgttccaggactccatggaaaaaatgatatcgctggcggcgatcgcctgcggggtggtcggcaggttaccgccgcgatagccgggggcggcgaccaccagctgttcatcggcaaacagatgccggctttccattccctcccaatcgccttgccccatgcgaatggccagatcgataccctcctgttgcaggttaaccaccgccaggctggtcagcaggcgcaccgcgatctgcggatgccgcgtctgaaagcgcgccagccgaggcagcagccagtggcagccaaaggaggggagcgtcgccagggtcacttccagggtgcggggtttgatctgcaccatgcgcgtggcgtcggcgatgtgctgtaacgcctcgcggatttgcagggcatagagccgtccttcttccgtgatgcgcactccgcggccgtggcggataaagagcgtgacgccgaccagggcttccagctgtttgatgtgctggctgaccgccgaatgggtcacgctcaactcgtgggcggcctgcgttacgctgccgaggcgcgccaccgcttcaaagctgcgcaggctggcgacagggggaaaatctgccatggtggtttctctgtcagtgagtcgatacgttaacgttactaccgggttagcggcttttaaagccgctgcaaacaagctgaaaaggagccaaatgccgcctcagtcggtatagcacaaggggaactggagggctaccgcgaatctccaatctgttagtttgactaaccattgcggtaagtatcccgtgatattcgcggcatcggttttccagtaaggtaaagccgcaacccctttatcgcaggcaggagtgacgatgaaactcattggtatgatggattcaccttatgtaagacgcgtggcggtttctctggcgctctatggcgtggaattcgagagcctgccgctatcggtctttagcggctttgacgaattttcccgcattaatccggtggtcaaggcgccgacggtggtgctcgataacgggacgcagctgatggactccacgctgatcctccactatttcgaaacgaccaatccggccgggcgccggctgcttcccgtgcatcccgaggcgctggcccgcgatctgcacctgctgggggtgatcctcgccgcctgtgaaaaagcggtccagcatgtttatgagcaccgtctgcggccggaagagaagcagcatcagccgtggatagcccgggtgaccggccagctgctggccgcctgtcgggagtgggacgcccggctggcagaccgcgccgccgccgcgcagccggatcaggtgctggtcaccagcacggtggtctggtcctttatccagttgatgatcccggcggtggtgtcggccgcggcgtttccgcatattcgcgcgctggcggagaaaggggaggcgctgccggcgtttcaacagtatccgctgggttaacggcaggggtggagaggggcgccgcagcgtggcgccctgaagcaggagaggatcaccagcagacaaacccgccgtcgaccaccaggtctacgccggtgcagaacgaggcggcgtcgctggcgaggaacagcgccgggccggccatctcttccaccttcgccatccgctgcatcggcgtctggctttcaaactcgcgggtctggtgcaccatctccggacgggtattcatcggcgtggcggtatatcccggactgatggaattgacgcggatccctttgcccacccactccatcgccaggcttttcgacagatggatcacgccggctttggagcagttgtaatgcgcctggtcgaggccgcggttaacaataatccccgacatcgaggcgatattgataatcgacccgccgccggactccagcatcagttccgcttccgctttgcaggagttccatacgccagtgagattgatatcgatcacccgctgccattgctcgctctccatctccagggccggattggcgttggcgatcccggcggcgttaacggcgatatcgaggcggccatagcggcttttggccagcgcgacggcggcgcgcaggtcggcaatctggcggacatcgccgttataagagcaagcctgaccgccgatggattcaatatggctgaccgtttccgccagcccgccgtcgtcgcgaagatcaaaacagactacccgtgcacccgcgctggcgaggctgcaggcgatggtctgtccgatgccgctgccggcgccggtgacgaaggcgacgcgatcccgcaggctaaataggtgttgtgcaaagtctttaccgatcataatgtttattctcttcaatatagtgtcgaacgtcgggagcctggcttcccggatggtggtgcgccgcgccttatccgggctacctttcggcggtgttacgtagccccggtaagcgtagcgccaccggggggccgtcccggagtggtagcgccaattcgggacgccttattcgggcgatggggcccgctaacccgcggggattacgacataatcaaaccgccatcgatattgatggtctgcccggtgagatagcgcgcgtcgtcggaggcgaggaaggccaccagcccggccacgtcttccggcttaccggcgcgtttcattgggatcccttcgacccattccgccatcagttcgcccttgccgtagcgcttctgctcggtgctgagaatttcgccccacacgcggtcgttgtaatcccacatctcgctctcaatgatgccggggcagaaggcgttgacggtgatattccacggtgccagctcgtgcgccaggctttgggtaatgccgatcacgcccattttgctggcggcgtagtgcggcgtgtagataaacccctgtcgcccctggccggaagaggtgttgatcaggctgccgtgattctgtttcaccatatatttggccgcctcgcggcagcacagccacacgccggtggtgttgaccgccagcactttttcgaaatcggcttttggcatccggtcgtagtaatcgatggtgatcaccccggcgttctgaatggagacgtcgatggtgccgaagcgcgcggcggcctgctcatatagcccctgaacctgggcttcatcggtgacatcgacctgcagcgataaaatatccgcctgatagcgctgacgcagggtttcggcggtctcgtgaacgcgctcggcgttggagaccatcaccagattcgcgccgtcgcgggcaaagcgctcggcaatgcctgcgccgatgccgcggcaggcgccggtgatcaccaccgttttgttctggaaatctcgttgcatattttttccctttcgctgagccgggcaccaggcccggcggaagatgtgaatcgttgccggttagctggaggtggcgccgttgggggggatggcggccagtttttcctcgtggcggcgcatcaggatgaccttgctctgcagcttctgctggaactggtcgacgaccacagcggtgacaatcaccacgcctttaatcaccatctgccagaagtcgctgacgcccatcatcaccatgccgtcggcaaggaagacgatgacgaaggcgccgataattgacccggtcacccggccgcggccgccggccagcgcggtaccgccgagcacggtggcgccgatggcgtccatctcaaacatgttgccggtcatcgggtgcgcggtttgcagctgtgatgcgacgatcaggccgacaaacgccgcgcacaggccggagaaggcatagacgaatattttcgctttcacgatcggcacgccggcgaggcgggcggcagactcattgccgccgatggcgtagatgtagcggccaagcggcgttttagtggtcagccagtagcccagcacgaggaagccgatcatcagccagatcggcagatagacgccgagcagggtgccggatccgagggtggcgaaaccggtgttgcccagcgcttccatgccattgagattcgggtaggtgctcccgtcgttaaacagcagcgcggagccgcgggcgacgtacatcatgcctaaggtgcagataaacggcgccacgccgaagcgggtgatcaccgcgccgttgaccaggccgaccagcacgccgaagatcgccacgcagaggatcacctccgggacattaaagaagaggatatcgccgttccacagcggcaggccgttggtcagcagcgcgcccgccaccatgccgcagatccccgctaccgcaccgacggacaaatcaatgccgccggtgagaatgaccagcgtcatgccgatggccagcaggccggtgatcgccacgtgctgggtcatgatcagcaggttagaggcggtcaggaagttgggtaccatcacgctgaagaacgcgatcaccagcaggagggcgataaaggtgcgggccttcagcaggtacatataaatcatatatttctggttcatgatggattccagcctgattaatcttgaggtgttgaagccgcgattaactgttcgcgggtcaccgcatggcgcggtaaatcggcggtaatgcggccatcggccatcaccaggatgcggtcggccagggccatcacctcatccagttccgaagatgagaacatcaccgccagcccctgctgagccattttgccgatcaggtgatagacgtcggttttcgcgccgacgtcgatgccgcgcgtcggttcgtcgaggaacaccacctgcggctgggtcatcagcgctttacccagcaccactttttgttgattgccgccgctcagcgaggtgatgggcaatgtggcgtcgctgaccttgatcgccagctgctggatcatctctttcacgcaggactcttctttttgcgggttcaaccagcgccaggcgcggcggaacccctgcaggctgaaatcagagagcgtcatgttggcctgaatcgacatcatctgcaccacgccttcgccctgacggtcctccggcaccagcgccagcccctttttcaggcgctgttgaaagcgagatttgccgatgctttcgccgttaagatgcacctcgccgcgctggcagggcatcaagccgaccaggcctttaaacagctcggtgcgcccggcgcccagcaggccgtaaataccgatcacttcgcctttgctgagggtgaaggtgacgtcattgagcttgtaaccgccgctgggatgcagcgcggtcagccctttgacgtcaagcactgcgtcgccttttggcgccggttgataatcaaagtgttttttcttatcaccgaccatctgctcgatgatccacggtacgctggcgtcgctgacgtgacgctcgctgataaagcgaccgtcgcggaaaatggtgatgttgtcgccaatctccatcagctcttcgaggcgatgcgagatatagatgatggtcacgccgcgccgcttaagctgcgcgatcaccttgaacagcactttgacctcagactggctcagcgccgaggtgggctcgtccatgatcagcacgcgggtgtctttcgacagggcgcgggcaatctcgactaactgctggtggccgataccgagttcacccagcggagcgtaaggatcgacatccagctccagccgttccagcagcgatttggccagcgcgtactggtatttttcgttaatgcgtcctttctgaaagaattcattcgccatgaagatgttgtccatcacattcatattgggaaataaattcagttcctgaaaaataatactgatgcccagtttttctgcctgatgcgtcgactgtaatgaaactgcttcaccatcgaggataatttgcccggaggagggcgtttccacaccggcaagcattttcatcatggtggatttacccgcaccattttctccgattagcacgttgaccttatttcgatagacccggtaattgacattatccagggcggttacgccgggatagacgcgcgacaggccgcgggtttcgataatcacttcggactcaacgggctggggagcgacgagatcgtgcggcgccatattattgtccccctgcatgaatgattttcgccggggtaatttccgggagagtttgtggaatatcccaggccgagaagacgccgtacacctccacgctgtcgccggttttgacgttggctgtctgaatcattttgaccgcctgactgttgatattcttgctgtactcgccgaacagcacctggtcattaaagtcctgatagctggcgccgctgtagccgtcgcgcagctgggtgccgcgcagggtagggccaatctgcaccgtcaccttcccgacgctggcgtcggtcaaggtcattttgccgctgcgcgaggcggtatcgagtttgctgacggtacctgaaaccttgacgtagaagatgcaggggttttcatcctgcgcacggtagccgagggttttacaggcgctatcaatgtcttttgccgccttgagcgcgctcatcagttccgccgccggacgcgctttcgtcaccacctgcggtacgatgctctgctgccaggttttatccatattcgccatatgcgggttgggcggggatttcaggtctgccagctcctgctgcgagacgatgcgacagccccctagcgccagtacggccagcgtcagacaggttttcttaaacataatgctctcctctgcgcccccgcaggggcgcaaccacccgaactcaggacttaatgttgaaatcctggactttatcggcgttatcctgagtaatcagaatgccgcggaacatcacgcgctgcttcgccggcttctcgcctttttgcaggtagttatccagatcggtgacgccctgagcggcgatggcctgcgcctgcagcatcacggttgcctgcagggtgccggctttcacggcgtcgcgctcatcgttgctgccgtcgatgccgacgacgatcacatcgctacggttggccgctttcagcgccgcaatcgcgccaagggctaccggcccgttgccacagatgacgcctttcacgtcggggtgcgcctgcaggatgctgtccatgatgcgtttgccgtcgatcagggtgcctttggcatcctgtttcgccacgctgaccatatccggatattggtcaatgacctgatggaaagatttagaacgggtgacgcagttattatcggcgaggttgcaggtcagctcggcgtatttgcctttctccgccattttctcgacgaagacgttggcgacctcagagccggcctggaagttattgtgggtaatttgttccagtgccacatcatcaaccggaatttcgcggttaattaagaccaccggaatgcccgcttttttggctttttcaacggcggcgacgctggcggtggagtcagcgttatcgagaataatgccctgcacttttttaccaatcgcggtgtcgataagctcattctgctttttgacatcttcgccatgggacagcacggtggttttgtagccgagagcttgcgctttttcgctggcgcctttggcttccgaggcgtaatacgggttatccagcgagttgaccatgatcataatggtgcctttctccgcggcgtgcgcggcaaaggagaaggcggtcagggtcgcagcggttaaaagggttatacgtaatttcatgactctgttcctgtatttttatattcgaacaaatgagcccctgagcgggcaggcttttacggtctgaaatttcccctaatgtattcggggatagcgatatcgttatgggccgggtttctcctgtgataagtgaatgcgtgtcgtcgcgcagtctggcggtcaggctggcgagtccggtttccataatgttcggtcgaccgcatggcgccactcctgccagcgcgtttgtaaacgctggtggcgggccatgtcgggctgaaaggtgctgtgttcggttaagaaggcctgcagatcggcggtcgaccccggatggagcgctttgcgcgccagcaacgccgcgccgatggcggacagctccggcacatcgctgcgcatcaccgggcagccgagcagatcggcctggtattgcatcagccagtcattgttggtcggcccgccgtccaccatcaacgccgtcagggtgaactcctcatgctgacgcatcgccaccaccacgtcggctatctgataggtgatggactccagcgccgcacggatcagatgcgcgcgtttcaccccgcgactcaggccgcaaatcacgccgcgggcgctgtcatcccaccagggcgcgccaagaccggtcagcgccggcacgaagtagaccccgagggttgagtcgacggaggcggggagggtattcagctcatgggccagctcggcggcagagagttcgctcagtccggtgctgtccgccatccaggcgacagcatcgccggtgtggggaatattcccttccaggccccacaccagctggtcgccatcgtgccaggcgacggtggtcgccagcgcgtcgatatcgcactgcgccgatttgaccggggccatgaccgaagagccggtgccgtaggtggctttgacgcagcctgcctcgccgagcgcgtggccgaacagcgcggcgtgggagtcgccgatcatcgacatgatcggaataccgtccggaatggcggccagtcctttggtatggccgaagaggccgctcgacggtttaatttccggcaacgccgcgcgcggaatgccgaacagcgccagcatctcgtcgtcccactcgccgcggtgcaggttcagcagctgggtgcgggaggcattggagtagtcgcagcagaaggcttctccagcagtcagattccacagcagccagctgtcgatggtgccgaggcaaatctcaccgcgttcggcgcgcaggtggccatcgacagtcgcatccagcagccagcgcattttggaggccgagaacagcggggcgattggcaggccggtggcacgcttaatgtgctgttcctgacgatcgtgacgcagcgtgtcgcagaacgcggcgctgcgggtgcattgccaggtaatggccgcgttaatcggttcgccgctgtcgcgataccagccaatggcggtttcccgctggttgctgatagccagcgcggcgacgttttccgcgccaacgtgggccaccgcgctggcgatcaccgtcagtgaggcggtaaccagcgcttcgcccgattgctccacccagccgtcgcgcggcgtttggatcgccagcggctgcgagaatttgacgataactttgccccggctatccagcaccaccgctttggcgttggtggtgccttcatccagggcaatgatgaactcttttgctgtcgcctgcatcgtgctctcctcggtcactcggtgtcctggaaccgcgaagacgaggaatatctcccaccgtctcctgcgtctgtgcaggccatgttgtgacatttcattatcatctttttaatcactgaatatatattcgatagtgattatttatttgataccttaagccacaaacccggtgacgggctaccggaaaaatcatcaattgtgctggcaatcacatttcgccgatcggcgaaagcggcgataggcggctggagtggttgattaactgattgaatttaaatgtattaacagagccagccctgaagctaaaaaagcacgtcagggcgacagagaggcaaccagcgcggcaggttagtcgctaaccagcattcgggcggtagggtaatcggtgattaaaacatcaatgtagccgccggtgagggcccctttgatggccgcgactttgtcggtaccgccggccagcgcgaccacgttcgggcattttttgaccttctccagcgccataccgatcaccggatcttcatcatcgcgtaacaccggatggccgtttttgtcgtagtagtgcaggcagatatcacccaccgcgccgcgcgccgccagcacctgcagcatatcttcgtgatagtaattaccggaggttttcagcagttgagagggttcgagaatgccgatgccgacgatggcgatatccacttcatcaaagcgcgacaccacgtcagcgacgtctttgctggccagcagccggttgcgctcctccatggatccttcgatgctctgtgacggcagcagccaggcgtcgcaattcaggcgctgggcgagggtctgggtaagaatcgtcgcctgcacgttaccgtttggcccgacgccgccgagcagttggatcacgccgctggctttcaggttttgcgcatgaacttcatcgaccatcgcgcgaatggttgagctccacgaggagacgccaatcagatcttttggccgcagccgggtttccagatagtgggcggcggcggagccaatcgcccgcttgatggtatgatcgctggcctcttcctcggtatccaccaccaccgcctgcttaaggccgtagcggtcctcaagccctttttcgagcttcagaaagatgttggacggctgaacgacgctgatcttgacgacgccttctttctggcagcgggtaatggcgcgggagacaaatgactgagacagcgagagaagttgggcgatatcagactgctttcgtccttccagatagtaaagcgtggcaatcttaaccaatagccgttgttcatcctgcttagccatattaatcctcgaaaatcatttatcgcctttcttcaggcggttagctgcagccattatcgtagtgacttttatcatacgcgaaaaaaaatcagacttaagtgtgacaggcgtctaacttttgccaatcctcaaaatcgactatggacaaaaacaaaacagccaggccataatcgaataaagaatcattattgaatatatattcaaggcgatttcgagtcaatgtgtttatccgggcttcgcctggagcgggaggcagaatgttcctgagtagggcgctgtggcagaaggcttaccacccggcatagggatatctggtttttttagtccttgctggaataaatattccatgctgaaaataaattcagaggtgtgaaatgaatccctacagatatgatattcagacgctggagcgtaaagcccgcgcggtgcggcgccatattgtgcgcttaaacgccaatagtccggccggcggccacaccggggctgacctttcgcaggtcgaactgttaaccgcgctctatttccgcgtccttaacgtcgcgccggaccggctcgacgacccgcagcgcgatatctacatccagtcgaaaggccacgccgtgggctgctactactgcgtcctggcggaagccggcttcttcccggtcgagtggctggagacctaccagcatgccaattcccatctccccggccacccggtgcggcaaaaaacgccgggcatcgagctcaacaccggcgcgctgggccacggtttgcctgttgcggtggggctggcgctggccgcgaagaaaagcaacagcacccgccgcatttttttgatcaccggcgacggcgaactggcggaaggcagtaactgggaagccgccctggcggctgcacattacggcctggataatctggtcattattaatgataagaacaacctccagctggccgggccgacgcgcgaaatcatgaataccgatccgctggccgataaatggcgcgccttcggtatggaagtcagcgaatgccagggtaacgacatggcctcggtggtctcggtcatcgaggggttgaagcaggaaggtaaacccaacgttattattgccaacaccacgaaaggtgccggtatttcctttatccaggggcgcccggagtggcaccaccgggtgccgaaaggcgaagaaattgcactggcactggaggaactgaaagatgagtaatgcagaacacctggctaacgtcatggtcgaagcctttatcgccgccgtggagcgcggcgtcgatctggtgccggtggtagccgactccacgtcaacggccaaaatcgcgccgtttattaaacagttccccggccggctggtgaacgtcggcatcgccgagcagagcatggtcggcaccgccgccggtctggcgctgggcggaaaagtggctgtgacctgtaacgccgcgccgtttcttatctcgcgggccaatgagcaaatcaaagtggatgtctgttacaacaacaccaacgtcaagctgtttggccttaacgccggagccagctacggcccgctggccagcacccaccatgccattgacgatctggcggtgatgcgcggcttcggcaatatccagattttcgccccgtcctcgccgcgcgaatgtcggcagattattgattacgccatcggttatcaggggccggtctatattcgcctcgatggcaaggcgctgccggaactgcacgatgaaagctatcgctttgtaccgggcgcgatcgtcacgctgagggaaggcgatgatatcgcgctagtggccaccggctcgacggtgcatgagatcgtcgatgcggcgcagatgctggccgacgcggggattcaggccaaagtggtgagcgtgccatctcttcgcccctgcgataccgccgcgctgctggcggcgctgaagccgtgcaaagcggtgattacggtggaggagcataacgtcaacggcgggctgggcagcctggtggcggaagtattggctgaggctggggtgggtatcccgctcaaacgtctggggatcccggatggtgagtatgcggcggcggcagatcgcggctggctgcgtaaacaccacggtttcgatgccgcttccgtcgcggagctggcgcagaaaatgcgctgatttttcgccgtctaaaaccgataacccgtgcggaatgccgcgcgggtttttttacggcgcgcagagcgtgatgatgtattcccctgcctgaatccattgcagccgatactccacggtggagagccgaagacgcagatttccttcctttattgcagccagcgtaaaatcgttaaaaccgacgcccgcctgtacgtcgggatggcaggccttaaacccactctcttttgccgaaaacgccagcgtcagcgccagcgggaagggcaggccgctgcgcagcagcgccgttttttccgccgggctgataatgctgctctccagctccgcggccagctgtggggtaaaccggcgctcgatatcgacgcccaccggccgatcggcgatcaccgccagcgcgcgctggccgcaatgacttatgctgccgaaccagggcgtgggccacagcggctggcgctggtcgccgatggcgggaagccgtttctcccccacctcgcgcagggcgtatgccgcggcgatgcgtccggccaggtgctccgcctgccgcttgcggccccacccggtcaggctggcgtgatagggcagccagaacagatcttcaggctggaaagtcgccgggtcgaagtcgatctgctggatggtatagccggccagaggcaaaacggtgcgatggtggcgcatagggtaaggttaccgcggttgcccccgccctttgtccagcaagggcgggggagggagaacccgctatcagaagtgggtgttgacgctcaggtaccaggtgcggcccgattcattgtaggtctcggcgccggcgccgtacatcgtgccggtggcgcccccggtggtctgggcgttgcccgcgcgccagtggcgcttatcgaagacgttatccacgccgccggtcagactgacgtatttggtgacgtcccaggtcgcgctcaggccgaggatgctgtaggggctaacctcgttcttctcgctgccggtgaccggttgacccttgtagttgtacttcttcggctcctgcttgccgtaccaggtgaaggtcgactgcagcgaaacgtcatcgcgaacctgccagctcagggtggagttcagcgtgtattccgggataatcgacagacgatcgccggtctttttgttcttactctgcagcatataggtgatgttgttggtccagttgacggtctcgctcaccggaacgttcaacgtcccctccagaccttccaccaccgctttcggcacgttttcccactggtagagatcggtacctttattgttttgatagaccggagcatagcccgcttcaatcttgttgcggtagtcgttgcggaaccaggtgacgcccgccagccagccgtcgcgtttaaactcgaggccaatctctttgttgatgctggtctcggcttttaagtcgtcgttaccctgcagatagcagccgtctttactggcatagcagccctggcctttactgtagagaatgtagttcgggttggtctgatacaggctcggcgctttataggcgcgagcgatacccatcttcagcgtgaagtcgtcccacagcccctgcgacaggttgagggacgggctccagttattgccgacaatgctgtgatgatcgaaacgcagcgccggagtcagcatggtggtgtcggtcagctccatgttgttctcggcgaacagcgagaagatttccgcctgcgagtacgggctgcggccggtgctgtcgtaacccggaatttcgcctcccgacagcgcctgggtgttggacgcgttatccttcatccgctgttgattccactcgctgcccagcgtcaggttctgattaaccaggtagtcgaacgggatactgacttcactgtgcagcatcacatctgacagatcgatatccgagaactgattactgttaaagatcccctcggtgcccccggccaggccttcgcctttgcgcgagttgcgggtgcgctcgtactgcgcccagttgctggtggtcaccccgttgtcccgggcgccgttccaggtgaccgagtaggtgttgcggtacagccggttggtctctttaccgtagttctcttttaccaggtcgttggtgttggtgttctgggtgtcgccagcgtagaggttgccctggcggctgtagccggcctcaaactccagcgactgcatcggagcgaattcccagcgcaccagaccatcgatgtttttgtttttcaccccttcgcgcccggccggcagggtgtcggcatagatcccggtacgttcggactgatggccctggttgatatcccaggcgtcggcctgcgttttgtcgaggttaccgaacaggcggaagctaaaatcgccgcccagcgggccgctgaggctgaagttagtgcgtttggtggagccttcatccttgtgctccggggcgttcatataggtgttccatgagccgtgccactcatcgccggtttttttggtgatgatattcaccacgccgccggcggcgccgttgccgtagcgggcggcggccgggccgcgaatcacttcgatacgttcgatcatctccggcggcacccagctggtatcgccgcgggtgtcgcgctcgccgcgccagccaaggcgcacggagttgcggctggtgaccggcttgccgtcgatcaggatcagggtattttccgggcccatgccgcggatatcaatctggcggttgttgccgcgctggccgctggtggagttgccggtcaggttgactcccggcatggtgcgaatgatctccgagacgtcgcgcgccggggggcgtttgcggatctcatcggcggtgatggtggagacgcccggcgcctgcaggttctgctcggcggcggtgaccaccatggtctcttcagcggcgctgtttttatcgtcggtggcggtttccgctgcgcttaacggaaaagcaaccccgtaaattcccagattgaccagcaaggccagggatttgatcctgttattcattgttattcctgctttttgtcgccacgttccccaaacgccccttcccaccgggaggggaggcggcataaatgttgccaaaagcgggcaaaggcactccgtcgctggctgaataagcccgatttgacatgttctgatgaaagacgcgcttcccacggcgcgctaatacgctattgcaaatgcaaatagttatcaataatattatcaataaataatgacaattaattaaaaaagtcacgctatacatagggttaatgacagaatgttaaggacaggaagcgaggagtggtggcaaaccctgcgggggccgcagtgccgcgcagtggatggcgccatcgaggtaacgttctggtggcgggacccggcgggggatgaaacctgctctccccatcgtcgggtatggctctatatcaccggcgtgaccgaccaccatcagaatgcgcgtccgcaatcgctgcaacgtctccccgggaccgacgcctggttctggcgcactacgctgtcgccgacctggcgcggcagctactgttttattccctccgaccgtgacgatgatttttcccctgaggtgttcagcgctgatgcgcccgaccgcgcgctgctacgcgaaggctggcgcaaactgctgccgcgggcgatagccgatccgctgaacccgcacagctggcggggcggacgcggccatggcgtgtccgccctggagatgccgcaggcccccgcgcagcccggctgggacccgcttaatgaggcgcatcctgccgcccgttgccttgagtggcgcagcgcgcgtctgggcaaccatcgccgggtctggatctacaccaccggcgaggctgtcgacccgcaaacgcggccgctggcgatcctgctcgacggccagttctgggccgagagcatgccggtgtggtcgccgctggccgccctgacccgcgaggggagactgccgccggcggtctacctgctgatcgacgcgatcgacaaccagcgccgcggggttgagctgccctgtcaccgcgatttctggctggcggtgcaggaggagctcctgccgctggtccacggctatgccccgttcagcgaccgcccggatcggacggtggtggccgggcaaagcttcggcggtctggcggcgatgttcgccgctctcaactggccgcagcgctttggctgcgtgctcagccagtcaggctcctactggtggccgcaccgtgatggccgcgggacgggctttatcggcgaacagcttcgccagggtgaggtgtccgcggccgggctgcgcgtctggctggaagcgggccaacgcgaaccgatcatttttcgcgcgaaccaggcgctactggcgcaactcaccacaacacagcagacgattttctggcgtcaggttgacggcgggcatgatgcgctttgctggcgcggcgggctgacggcagggcttatccagctctggcagcctctgctgtcgcacccttagcatcgcgttttacgacaggagtttgatatgcaattcagtaaccccttcgacaatccgcaagggcagttttacattctgcgcaatgatcaacagcagtacagcctgtggccggcgcactgcgacctgcctgccggctggacggtggcgtgccccccgcagtcggccgaggcctgcaacgcctggctggcggccaactggtcaaccctgacccccgcccatcatgcgtcataaggagctgacaatgaccactcgtttaccgttggttgccgcgcagccggggatctggatggccgagcgcctctccactctgccaggcgcctggagcgtggcccactatgttgaactgcgcggcgccctcgacccgacgctgctgggaaaagcgattgtcgccggtctgcagcaggcggacaccctcagcctgcgctttgaggaagaggagggggaagtctggcagtggctggcggccgaccgcacctttgccgaaccgtcgatcattgacctgcgtacggcgccggatccgcatcgcgccgccacggagcggatgcaggcggacctggcgcaggatctgcgtgtcgacggcggcaacccgctggtgtgccatcagctgctgcgcgtcggcgacgaccgctggtactggtatcagcgatatcaccacttgctggtggatggcttcagcttcccggcgataacccggcagatcgccgccatttaccgcgcctggcagcggggggaagccactcctgagtcgcctttcacccccttcgccgaggtggtggacgagtaccagcgctacgccggcagcgaggcctggcagcgggataaagctttctggcaggcccagcgccaggcgttaccggcgcctgcctcactctctgccgcgccgctgggcgggcgcgccgccgggagcgatatctggcggatgaagctggagatgaacgccgacgccttccgccgcctggccagccatgcgccgcagtgtcagcccgctgacctggcgctggcgctcaccacgctgtggctgggccgcctgtgcaaccggatggactacgcggcgggctttatctttatgcgtcggatgggttcagccgcgctgacctcgacagggccggtgctcaatgtcctgcctctggcggtgcatattgacgcccgggagacgctggcggacctggcgatgcgcctcgccgctcagctgaaaaagatgcgccgccatcagcgctatgacgccgagcagatcgtccgcgacagcggcaaagcggcaggggacgaaccgctgttcggcccggtgctgaacgtcaaagtctttgattaccagctggatatcgatggtgtgcaggcagtgacccacaccctcgccaccggcccggtcaacgatctcgagctggcgctgttcccggatgagaccggcgggctgtcgctggagatcctcgccaacaaggcccggtacgacgaagccgagctccgtcgccacatggcgcgactgaccgcgctgctggcgcagttcgccgccgatccgacgctgcgctgcggcgaagcagagatgctctccgccgacgagctggcccggctggcggcggtcaacgataccgctgtgccgctgcctgccaccaccctcagcgcgctggtggccgaccaggcgcggaagaccccggatgcgccggcgctggcggacgcccgctggcagttcagctatcgcgagatgcgtcagcaggtggtggcgctcgcgcagctgctgcgtcagcgcggcgtgaagcctggggacagcgtggcggtggccctgccgcgctcggtgttcctgaccctggcgctgcacggcattgtcgaagcgggggccgcctggctgccgctggacaccggctacccggacgaccgcctgcggatgatgctggaagacgcccggccgtcgctgctgatcgccacggaggatcaactggcccgcttcagcgatattccggggctggaaagcctctgctaccagcagccgctggccgccggggatgacgcgccgctggcgctgtcaaaaccagaccataccgcctacatcatctttacctccggctccaccgggcggccgaaaggggtgatggtcggccagaccgccatcgtcaaccgcctgctgtggatgcaggatcgctatccgttatctgccgacgacgtggtggcgcagaaaacgccgtgcagtttcgacgtgtcggtgtgggaattctggtggccgtttatcgccggcgcgcagctggtgatggccgagccggaggcgcaccgcgacccgcaggcgatgcagcagttcttcgcccgctacggcgtgaccaccacccactttgtgccgtcgatgctggcggcgtttgtcgcctcgctggatgccgacagcgtcgctgcctgccgcacgctgcggcgggtattctgcagcggcgaagcgctgccgacggaattgtgccgcgagtgggagcgcttgaccggcgcgccgctgcataacctgtacggcccgacggaggcggcggtggacgtcagctggtatccggcctgcggccctgagctggcggccgtgaccggcagcagcgtgccgattggctggccggtgtggaacaccgggctgcgcattctcgatgccgcgatgcgcccggtaccgccgggggtggcgggggatctttatctcaccggcatccagctggcgcagggctatctggggcgcccggatctcaccgccagccgctttatcgccgacccgtttgcccccggcgagcggatgtatcgcaccggcgacgtggcgcgctggctggcgaacggcgcggtggagtaccttggccgcagcgacgatcagctgaagatccgcgggcagcgcatcgagcttggcgagattgatcgggtgatgtcggccctgccggacgtggggcaggcggtgagtcacgcctgcgtcttcaaccaggcggcggcgaccggcggcgatgcccgacagctggtgggctatctggtctctgactccggcctgccgctggataccgcggcgctgaaagcgcggctggcggaacagctgccgccgcatatggtgccggtggtgctgatgcagctcgctgagctgccgctgagcgccaacggcaaactggaccgcaaagcgctgccgctgccgaccctcggcggcgagcgcagcggtcggccgccggagcccggcatggaaactcttgtcgccgccgtcttcagccagctgctgggctgcgaggtgaacgatatcgacgccgatttcttcgcccttggcggtcattcgctactggcgatgcgcctggcggcacagctcagccgccagctggcgcggcaggtgaccccggggcaggtgatggtggcctcgacggtgggcaaactgagcgcgctgctggccgccgatctcagcgatgagcaggcccggcgcctggggctggatacgcttctgccgctgcgcgagagcgacggtccgacgctgttctgcttccatccggcctccggcttcgcctggcagttcagcgtgctggcgcgctatctcagcccgcgctggtcaattaccggtattcagtcgccgcgcccgcaggggccgatggccagcgccgccagcctcgacgaggtctgcgagcatcatctgcaaacgctgttggcgcagcagccgcacggcccttattacctgttcgggtattcgttgggcggcaccttagcccaggggattgccgcccgcttgcgccagcgcggcgaagcggtggccttcctcggcctgctggatacctggccgccggagacgcaaaactgggcggagaaagaggccaacgggctggatcccgaggtactggcggagatcgaccgcgagcgcgaagcgttcctcgccgcccagcaggggcaagcctccggcgagctgttcagcgccatcgaaggcaactatgccgatgcggtgcggctgttaaccaccgcgcatagcgcgaagtttgacggcaaggcgacgctgttcgtggcggagaagacgcggcaggaggggatggatccgcaggtcgtatggggcccgtgggtgggggaactggaggtgttcagccagaactgcgcccacgtcgatatcatctccccgcaggcctttgaggccatcggtccggtggtcagggagattctggggtaacggttgagttcgggctacagcaggtagcccggctcagcgtagcgcaagccggggaaagaggagattaccggcggcccagcgggaccaccagcggcgtatgcgccaccggatcttcaatgatcgtgcagcgcagaccgtaaatccgttcaatcagatcggcggtgacgatctccttcggcgccccctcggcgacgatcctgccgtcgcgcagggcgatcaggtgggtggcgtagcggcaggcctggttaagatcgtgcagcaccgccgccagggtatagcccttctcgcgattcagctcactcaacagttccagcaggtcgatctgatggctgatgtccagccaggtggtcggctcatccagcagcataatcgccgtttcctgggccagcaccatcgcaatccacgcccgctgccgctggccgccggaaagcgtgtcgacgctctgcagcgccagatcgctgatcccggtcgctcgcatcgccttgttcaccgcctcttcatcttctttgcgccagcgggtaaacagcggctggtgcggatagcgcccgcgggccaccagctcctgcaccgtgatatcgccaggggtggtggcattctgcgccagcagcccgatgcggcgagcaacctctttactggcgtactgctggatctgcgcgccgtcgagccagacgtggccgctggcgggcgtcatcaggcgactgagggtgcgcaatagcgtcgacttgccgcagccgttggggccgataatggcggtgaagtgaccgtcagggatggtcacgttcagcgactcggcgatggtcttgttcccgtaggccagggttaactgctcgccgcgcaaacgggaggggacagcactcattttttgcgggactcctgaatcaacaatgcaataaggtaaataccgccgaggctgacggttaacacgccaaccggcagctgccacggcataaacagccgttgggcgccgtaatcggccagcgccagcagcagcgcgccgcacagggccgactgggtcagtccccagcgggccgtgccgctcaggcggcgggcgatatgcggcgccaccagcgcgataaatgagatcggcccggccagcgccgtcgaggcggcggtgagcaccaccgccaccagcatcagcagcaggcgcgaacgctcgacctgcacccccagcgcgcaggcggtatcgtcgcccatctccagcagccgcatccggcgaaccagcagggcgctgcccaccagcatcaacaggatcagcggcgccgacggccaggttttaccccaggtcaggccgttaagcgatccggcgttccacaggcccgcagaaagggcggtctccagcgaggcgcgcagcagcagccaggtgttgaatgccaccagcatggcgcgcacgccgatgccgataatgatcaggcggaaggtttcgatcccgttgcgccaggccagcagccagaccaccagcgaggtcagcaccccgccggccatcgccgccagggcgatcgccgtcaggttctggccgaagaggaccattgccaccagcacgccgctccaggcgccggtgttaaagcccatcacgtccgggctgccgagcgggttacgggtcagcgactggaaaatggcgccgctgacgccgagcgcggcgccgatgagcagcgccattaacacccgcggcagccgccattcgttcaccaccatcgcgacgttgcgcggcgcatcgccgaacagcgccgagaacacctggtcaatcgtcaggggcaccgggccttgcgccagcccgagcagggaaatcagcaggctggcggccattagcagcagacagctggctatcaggcggcgggacggggcaatcacaggccacctccccgcggctggcggcgcaccagccagatcagcaccggcgcgccgagaaaggcgcacaccaccgatacccgcagttcgccgggcaccagcaggcggccaatcacgtcggcaaacagcagcagggccggggtggcgagcagggtgaccggcagcgaccagcgatgatcggcccccaccagccagcgcgccatatgcggcatcatcaggccgataaaggcgatggggccgacgacggcggtggcgctgccgcacaggacggtgatgacgatcaggccgatcagctgggtgcgggcgacgcggctgccgagggcggtggcggtatcgttgcccaggctcaggctgttcagcgcccggctcagcagcagagcggcgatccccgccaccactaccggcagcaggacaattttcagcgtttgcagggtgcggatatccagcgaaccggcctgccagaagcgtagctgatcgtagacgtccgggttgagcagggcgatgccgttggacagcccctcgagtaccgccgcaagggcgaccccggcgagagtgaggcgcaccgggctcagctgaccgccgccctggctgccggtaaaggctaccagcagcgaggcgcagagcgcgccgcagaatgccagcagcagctgctcctgcggggaagtgatcccaaacagcgccgcgccgaggacgatggcgaagctggcgccggagttgacccccagcaggccggggtcggccagcgggttgcgggtgagcgtctgcatcagcgcgccggcgaggccgagggcgacgccggccagcagaccggccagagtgcgcggcaggcgcgcgtccagcacgatagtgcaatcagcgctttgacaggttccgctgaaggcggtgaataccgtgccgatcggcaacgatttggcgccgatggtcaggctaagcgcggcggctaaggcgagtaatagcaacaatccgggcacggcgacagagcgtaccgcggtcgtagaaaacgacataactgacatccctgatatgataatgatagtaattatcgttatcgattttattcagctatggtagcatgacccacagtaaaaagggtattaaaaataacgacaaggcgctgtaatgaaccgacaatcctggctgctcaatctcagcctgctgaaaactcacccggcgtttcgcgccgtttttatcgctcgctttatctctattctgtcgcttggcctgctgggcgtggccattccggtgcagatccagatgatgacccattcgacctggcaggtcgggctgtcggtgacgctgaccggggcgtcgatgtttgttggtctgatggtggggggcgtgctggctgaccgctatgaacgtaaacgcctgatcctgctggcgcgcggcacctgcggcgtgggctttgtcggcctgtgtctgaacgccctgctgccggagccgtcgctggcggcgatctacctgctggggatctgggacgggttcttcgcctcgttgggggtgaccgcgctgctggcggcgaccccggcgctggtgggacgggaaaacctgatgcaggccggggccatcactatgttgacggtgcgcctgggctcggtgatttcgccgatgatcggcggcctgctgctggccaccggcggcgtggcctggaactttggcctggcggcggcggggacctttatcaccaccttaaccctgctgcgtctgccgcagctgccgccgcctccgcagccgcgcgagcatccgctgcgctccctgctggcggggctgaccttcctctgccggagcccgcttatcggcgggattgcgctgcttggcggtctgctgaccatggccagcgcggtgcgggtgctctatccggcgctggccggtagctggcagatgtcggccggacagattggcctgctgtacgccgctattccgctcggtgcggcgctgggggcgttgaccagcggccagctggcccagacggtgcggccgggcgcgctgatgctggcgacgacggtgggatcgtttgtcgccattgcgctgttcagcctgatgccgcactgggcattgggcgcgctgtgcctggcgctgtttggctggctgagcgctattagctcgctgctgcagtacaccctgattcagacccagacgccggaacatatgctcgggcggattaacggtctgtggaccgcgcaaaacgtcaccggcgacgccatcggcgcggcgctgctcggcggcttaggggcggtaatgacgccggcggcatccgccagcgccagcggctgggcgctggcgcttgtcggtgtgctgctggttgggctgctacgcgagctgcgccgtttccagcgcccggaaattgtcaacgaaagttaagtcgggtgcgattgcccggtggcggctgcgccttaccgggtctggggtacggcaggcaggtgcaagctcagtaggccgggcaagcgccgcgccgcccggcaaggtgtgcaggccgggttcccggcctgatgcccggtggcggctgcgccttaccgggcctggggtacggcaggccggtgcaagctcagtaggccgggcaagcgccgcgccgcccggcaaggtgtgcaggccgcgttcccgtcctgatggcgcagcccgcgttagccgaacaggctggagagacgctggagcaccagcagagcgctgtagtagtcaaggcggaaggtctcggtgcccagcgggtagacgcgtttgcctgcgaccgccgggagatgcgccagcagcgggttggcgtagatggcatccgcatctttctggtcgccggcgaacaggaacaggctctggccgttcagaccggccgcgaggttctccccgcccagctgcacgatatcgtggcgtttaccctggctatggctggcgggcaggccgcccggcagcgtcgccaggctaaagcccagctgttgaagcatctgcccctgagccgattccggcgtccagatattggcgctgtgcgcggcggcggtatagaccagggcggtcaccggctgcggcggcagtttcattttttcttttaacgaaacgagctgtttattgaagtcggcaatgcgcgcgctggcctgttgttcatgaccggtgatctgccccagctgggtgagcagggtttgccagcttttatcgtcatagttgatgaccagcgtcggggcgatggttttaagctgatcgtacagcggcagggcggagtcgccgccggtcgcgctcaccaggatcagatccggcatctgggcggccaccgcttcggcgcttggttcgccgatgtacagccgcgccagcttgcgggctttggcaacctcgctccactggcgcagaaagccctggctatcggcgacgcggttgttcggcgtggtcgcgccgctggcgaccaccggagcgtcaatcgccagcagcgaaccggtaagcgtcacgctggtggagacaatgcgcagcggctgactcggcagggtatgcgtcccgtagctgtcggtgacctggcgcggccagtccgccgcctgggctgaggtaattcctaaaagcaacagcatgccggtcagcgcaccgcggcggcagaaagaaaagaagttcacgtcatcgcatcctgatttgaaaggtgataaatgcgtctcattttcaactttgtgtcagcaggatgcaagccaaagtggcggcgccatgacgtaacgcggttgacatggcgggcaataccttttaggttagccaaccaaaatataaatgataattattcttaatatctttatcgtttttggaggatgatatggaaacgtcactggctgaggatgtaaagaaaccgacccggaccctgtcgccggacagcttcttctttatgtcgccgtaccgcagttttaccacttcaggctgcttccgtcgcttctcacagcccgccgttggcggcgatgcgctgaacggcgagttccagcagcagatggcggccgcctttgccgaggcccgggcggcggggatccgcaagccggtgatggtcggggctatcccgttcgacacctgtcagcattccgagctctatatccccgagcgctgggaagcgttctctcgcccggaaaagcagcgttccgcccgctatgccgcgccgctggaggcgatggaggtggtggagcgtcgggagatcccggagcaggacgtgtttttagccatggtggaacgcgccgccgcgctgaccgccaccccggaagtcgacaaagtggtgctatcaaggcttatcgatattaccacccgcgaccgcgtcgacagcggcgcgctgatggagcgactgatcgcccagaaccccgccagctttaacttccacgtgccgctctccgacggcggcgtgctgctgggcgccagcccggagctgctgctgcgtaaagaaggacagcacttcagctctctgccgctggccggctccgcccgtcgccagccggacgatgtgctggatcgggaagcaggcaacaggctgttggcctccggcaaagatcgccacgagcacgagctggtgacccaggcgatgaagagcgtgctgggcccgcgcagcagtcagctgtcgctaccggagtcgccgcagctgattaccaccccgacgctctggcatctggcgacgccgatcgcaggcaccgcgctggcggaagaaaacgccatgtcgctggcctgtctgctgcacccgacgccggcgctgagcggtttcccgcatcaggcggcgaagcgcctgattgctgaactggaacccttcgatcgccagctgttcggcggcatcgtcggctggtgcgatgacgaaggcaacggcgagtgggtggtgactatccgctgcgcgcgtctgcagcagcgtacgctgcgcctgtttgccggcgcgggcattgttccggcctcctcgccgctgggcgaatggcgcgaaaccggcgtcaaactgaccaccatgcttaacgtatttggcttgaactaagaggcaaggatgattgcatttacccgttggccggaagagtttgcggcccgctatcgtcaaaaaggctactggcaggatctgccgttaaccaatctgatcacccgtcacgcggacaatgacgccgtggcgattatcgatggcgagcggcagattagctaccgccagtttaaccagctggtggacaacctcgcctgctcgctgcagcgccagggactgaagcgcggggagaccgcgctggtgcagttgggcaatgtcgccgagttttacatgaccttctttgcgctgctgcgcatcggcgtcgcgccagtgaacgctttgttcagccaccagcgcagcgaacttaacgcctacgccgcgcagattaaaccggcgctgctgattgccgatcgcgagcacgctctgtttgctgacgatagctttctccacgcgtttatcgcggaacatccttccctgcgcgtcgcactgttgcgtaacgacggcggcgagcgcgatctggcgacggagattaaccgcccggcggataactttatcgccaatccaacccctgccgacgaagtggcctttttccagctctccggcggcagcaccgggacgccgaagcttatcccacgcacccataacgattacgactacagtatccgccgcagcaacgagatctgtgggattaacgctgaaacgcgctacctcaacgcgctgccggcggcgcataactatgcgatgagttccccgggttcgctcggcgtcttcctcgccggcgggcgggtgatcctcgccgctgacccgagcgccacgctctgtttcccgctgatcgaaaaacatcagatcaacgttgcctcgctggtgccgccggcagtcagcctgtggctgcaggcgattcacgaatggggcagcaacgcccagctgcaatcgctgcagctgctgcaggtcggcggcgcgcgcctgtcagcgacgctcgccgcgcgcattccggcggaaatcggctgtcagctgcagcaggtgttcggcatggcggaagggctggtgaattacacccgcctcaacgatagcccggagcggattatcaacacccagggttgcccgatgtgtccggacgacgaagtgtgggtggcggacgccgacggcaacccgctgccgcgcggcgaagttggccgtctgatgacccgcggtccttataccttccgcggctattacaacagtccgcaacataacgctgaagcctttgatgccgatggattttactgctccggtgatctgatttcgatcgatgaagatggctatatcaccgtccagggccgggaaaaagatcagatcaaccgcggcggcgagaagatcgccgctgaagagatcgaaaacctgctgctgcgccatgaggcggtgatccacgccgcgctggtcagcatcgaagacaatctgctgggcgagaaaagctgcgcttatctggtggtgacctcgccgctgcgcgccgtcgccgtgcgccgcttcctgcgcgagcagggggtggcggaatttaaactgccggaccgcgtggagtgcgttgccgcgctgccgctgacgccggtgggcaaagtcgataaaaaacaattacgtcagtggctggccgaaggcaagctgggctgaaggagaacagagaatggcaatccctaaattacaggcatatgcgctgccggaagccagcgatatcccggcgaacaaggtcaactgggcctttgagccgtcgcgcgccgcgctgctgatccacgacatgcaggagtatttcctcaacttctggggcgaaaacagcgcgatgatggagaaagtggtggctaatatcgccgccctgcgcgacttctgcaaacagaacggcattccggtgtactacaccgcccagccgaaagagcagagcgatgaagaccgcgccctgctgaatgatatgtgggggccgggtctgacccgctcgccggagcagcagcaggtgattgccgcgctggcgccggatgaagacgataccgtgctggtgaaatggcgctacagcgcgtttcatcgctcgccgctggaggagatgctgaaagagaccggccgcgatcagctgatcatcaccggcgtttacgcccatatcggctgcatgaccaccgccaccgatgctttcatgcgcgatatcaaaccgttctttgtcgccgacgcgctggcagatttcagccgtgaagagcacctgatggcgctgaaatacgtcgccggccgctccggacgggtggtgatgaccgaagagctgctaccgatcccagtctccaaagcggcgctgcgcgcgctgatcctgccgctgctcgacgaatccgatgaaccgctggatgatgaaaacctgatcgactacggtctggattcggtgcggatgatggccctggccgcccgctggcgcaaagtgcacggcgatatcgacttcgtgatgctggcgaaaaacccgaccatcgacgcctggtgggcgctgctcacccgcgaggtgcaataatggcggcgctggattttcgcggtcagaccgtgtgggtgaccggcgcaggtaaagggattggctatgccaccgcgctggctttcgtcgaggccggggccaacgtcaccgggttcgacctcgcctttgacggcgaaagctatccgtttgccaccgaaacgctggacgtcgccgatgccgaccaggtacgcgaggcatgtagccggctgttggcgaacaccgagcgtttagatgtgctggtgaacgccgccgggatcctgcgcatgggcgctaccgaccagctgagcgcggaagactggcagcagaccttcgcggtcaacgtcggcggggcgttcaacctgtttcagcagacgatggcccagttccgtcgccagcggggcggggcgatcgtcaccgtcgcctccgatgccgcgcacacgccgcgtatcggcatgagcgcctatggcgcctcgaaggcggcgctgaaaagcctggcgctgaccgtcggccttgagctagcgggcagcggggtgcgctgtaatctggtgtcgccgggctccaccgataccgatatgcagcgcaccctgtgggtcagcgacgatgcagagcagcagcggatccgcggcttcggcgagcagtttaagctcggcatcccgctgggtaaaatcgcccgcccgcaggagatcgccaataccattctgttcctcgcctcttctcacgccagccatatcaccctgcaggatatcgtggttgatggcggctcgacgctgggggcgtaaatggcctggaagcgagagcttacgctggcggcgctgaacgccagcagcgaaaataccatggtggcgcatcttggcatcatctacacccgactggaagaggggctgctggaggcggagatgccggtggatgcgcgcacgcatcagccgtttggcctgctgcacggcggcgcttccgcggcgctggcggagacgctgggctcgatggccggttggctgatgaccgaagaagggcagtgcgtcgtcgggactgagcttaacgccagccatcaccgggccgtctccagcgggaaagtgcgcggcgagtgccgtccgctgcatcttggtcgccagagccagagctgggagattgtggtgtatgacgagaaggggcggcgctgttgcacctgtcgtctgggcaccgcggtgctgggctaagaagccgctgtttccccggcttgcgctacgcttagccgggctacgtatcggcgcaatggggtagcccggataaggcgcagcgcgccgccatccgggagtttccctgctcgcattgcgcttagcaggactacggatctgtaggtcgggtaaggcgttagccgccacccgacaaaaaaaacggcaccgttcacggtaaccctttcattcattttcctgccttaagtgatctcgctagcaatgtgagacaaatctctgtgggtgtacggcatctgcgatgtttcggtgttgttaaattctgcgttgtgatctagaaacaaaatgtaacatcctgattaccctaccggtggaccacaacaatgaataattcagggaaataccttatctgggcgctgctctccgtcatcggagccttcgccctcggctatatcgctttaaaccggggtgagcagataaacgcgctgtggattgtcgtcgccgcggtctgcgtttatttgatcgcgtatcgtttctacggcctgtatatcgctaaaaccgtgcttggcgttgacccgacgcggatgacgcccgcggtgcggcataacgatggcctcgactacgttccaaccgacaaaaaagtgctgttcggtcaccattttgccgccattgccggcgcggggccgctggtgggcccggtgctcgccgcgcagatgggctacctgccggggatgatctggatcctcgccggcgtggtgctggctggggcggtacaggactttatggtgctgtttgtttcgacccgccgcgatggccgttcgcttggcgaactggttaaagaggagatgggaccgaccgctggcgtcctggcgctggtggcctgctttatgatcatggtgatcatcctcgcggtcctggcgatgattgtggtgaaagcgctgacccacagtccgtgggggacatacaccgtcgcctttaccattccgctggcgatctttatgggcatctacatccgctatctgcgtccgggacgcatcggcgaggtgtcggtgataggcctggtgatgctggtgttcgccatcatctccggcggctgggtggcggaaagcccgacctgggcgccgtggtttgattacaccggcgtacagctgacctggatcctggtgggctacggatttgtggctgcggtactgccggtctggctgctgctggctccgcgcgattatctctccaccttcctgaaaatcggcaccatcgtggggctggcgattggcatcctgattatgcgcccgaccctgacgatgccggcgctgaccaagttcgtcgatggtaccggcccggtatggaccggcaacctgttcccgttcctgtttatcaccatcgcctgcggcgcggtctccggcttccatgcgctgatctcctccggcaccacgccgaaaatgttggccaacgaaagccaggcctgctttatcggctacggcggcatgttgatggaatccttcgtcgctattatggcgctggtggcggcctgtattatcgatccgggcgtctacttcgcgatgaacagcccgatggcggtgctggcgccggcgggtaccaccgatgtggtcgcctcggcagcgcaggtggtgagcggctggggctttagcattacgcctgatacgctgcatcaaatcgccagcgaggtcggcgaacagtcgattatctcccgcgccggcggcgcgccaacgctggcggtggggatggcctacatcctgcacggctcgctgggcggactgatggatgtctcgttctggtaccacttcgccattctgtttgaggcgctgtttatcctgacggcggttgacgccggcacccgcgcggcgcgctttatgctgcaggatctgctgggcgtgattagcccggggctgaaaaaaaccagctcgctaccggccaacctgctggcgacagcgctgtgcgtgctggcttggggctacttcctgcatcagggggtggtcgatccgctgggcgggattaacaccctatggccgctgttcggtattgccaaccagatgctggcggggatggcgctgatgctctgcgcggtggtcctgttcaagatgaaacgccagcgctatgcgtgggtggcgctgctgccgaccagctggctgctgatctgtacgttgaccgccggctggcagaagtcgtttagcccggacaccaaagtcggtttcctggccatcgccaataaattccaggcgatgatcgacagcggcaacattccgccgcaatataccgaatcacagctggcgcagctggtgtttaacaaccgtctcgatgccgggctgaccatcttctttatgattgtggtggtggtgctggcgctgttctcgattaaaaccgcgctggcggcgctgaaagaggataaaccgacggcgaaagagacgccgtatgagccaatgcctgaaaacctggacgcgattgagacccaggcgaaaggggcgcattaaccggtgtgccgggtggcggcttcgccttacccggcctacatttccgatcctccctctccctttgggagaggctcggggtgagggatacaaaagagaaatgacttatgtttgacaccctttccaaagcaggtaagtacctgggccaggcggcgaagatgatgatcggcgtgccggattacgataactacgtcgagcacatgcgaataacccacccggatcagacgccgatgacttatgaagagttctttcgcgaacgccaggacgcgcgctacggcggcaagggcggggcgaagtgctgttaaccctctttcggcagatagaggctgatttgctcctgggtacagccgtaaatcgccgccagtttttcgcgggtgcgcttctgcggacgggagtccagcgcttccagctgtgacaccgcggactggctgatgccgagtttagccgcgacctcctgctgggatagcccgcgcaggatacgccacgcggcctgcaggctgacgttttctttatgcatcacgtcgcatacttcgccaggcagcatgacgttatcatagatgtctgattcataaggaatatcttcccagtcgttttcatcctcgtcgtcgtactccagcagagccaggcgcatacgaaagtaatcgctgtaaggaatgacgacatactggtcttttccttcttcatccttgatgtactgaatagtcatattcggtatcttcctcatgaaggtaggtggtggtggttcggcgtttaaccgccacgacgtagcaggtatcgcccggcggatccccaaaggtgtagatgactctgtaatcacctaatcgcagccggtagtggttttcgggagaggacaattttttgatatccgagataggtgaagctttatcatccatcttctccagcctggatttaatgcggctcttataccgagtatcgattttagaaaattgcttatctgccgtttttgaccagacaattttcatccgtccctccactgtacgcccacacaaaatataaggaaataataagactattagataaattccgaatttcttatggggtactgtagagcggagaaaaaacgcaggtaagaggcaaaacgcaacccgtcgaggcggcgcgggaaggcctctgccgggcgacagaggcttgcagaaaatgtgcgatcaggcgttcaatccgccatccacgtccagccccgtaccggagatctgcccggcggccgggctggcgaggaaggtgaccgccgcggcgatgtcttccggctggccgtagtgaccgaccgcaatcatctggcgctgggcttccgcctgttccccatcctccgggttcatatcgctgttggtcggccctggatggacaaggttaacggtgatcccgcgagggcctaaatcacgcgccaggccacgggtcagggcgttgagggcggacttggtcatggcgtaaaccgcgatgcccggcatggccacgcggttagccagacagctgccgatgttgatgatacgtccgccatcggccatatgcaccagcgcttcctgggtggcgatgaccaccccacggatattgacgttgataagcgcgtcaatgtccgccagcgtcatggattccagtggaccgccgcgggctattccggcgttgttgaccagaatgtccagcccgccgagggaccgggccgcatgggtgacggcatcctgaatcgcctgcgcgctggcgctgtcggcctgtaccgcttcgccgtaccgacccagggcctttatttcatcggcgaccgcctgggctttatcgaccgatttttcatacgtaataaccacatcggcgccggcgcgcgccagcgacagcgcgatggcgcgacccaacccacggctggcgccggtaaccagcgccttcttacctgttaaatcgatctgcatgatgacctcgttgcgagagtggtgagcatcatcattaggtatagacggtcggggtgattaacggctgaagtattccaccttctcaaacgccgcgcgcagaacctcaggggttaacgtcaccggtaaatagtgaatcgactcgcccgggcgcagggtatgggcaatgacccggtccagctctgcgcggttattgatatcgacttccagcgccgccagggtggtcggcaggttaaagcgctgatacgcctgcactaactgcgccagcacatcgtcctgaccaagcagggcgctctgtaccagaatgccgtaggccactttggtaccgtggagaaatttatccgtctgcggcagcaccgtcagtccgttgtgcaccgcatgggcggcggcgacccgggtgtaacgttcccccagcccgccaaccatcccgccaccggcgataatcgcctccaccacatcgcgaaacgcctgggtcagatcgccgcggcgctggtccgccagcgccgtttcgctgctggccagcagcacatcgcggatcgccagcgcgccgttaatccccagccgcacggtgagcggcagcgccgtcggctgcggcgccagcaccacggcctcataccatttggctaaggtgtcgccaatgcctgccagcaggtactccgccggggcgttgagaatgatgcgcggttcgaccagcaccaggaagttggcgtcatcgaagatctcaaaattcagggcctgtccggcgtcgctataccacaccgacagcggcgtccacgccgcgcaggtggcggcgatagtcgggatggccaccagcggtacccccaggcggcgggccagcactttcgcgctgtcgagcagcgcgccgccgccgacgccaatcactaccgcccgatcgtcaccggaggcctgcaccagccccgccacgtcgcgttcgctgcagtggccggtaaagaggatctttttcgcctccggcaggtggaaggccgccggcagaaaaggttcggcgccggccagggcgcgctcgccatagacccacaccgctcgcgagagctggtcggcactgaaaaagtcgctcagtcgctcaaggctgccggggtgggagaaatagttggccgggccgggcacgacgcggatatcgctgttgctcatggaagctgtccttataggtgttgggctaacctgatgttatgtctggacatccagatggctaatattatttcgttgtatcttatgctttttacgcagttgtcagccagcggcggctatgaaaaattcgttaaatcagaagattaattgccgcacgggagcagtgatgagcacgaatcgccttgagatgcataacattagcctggccttctccggctttcaggcgctgaacaaggtggactttaccctccatggcgggtcggtgcatgccctgaccggggccaacggcgcgggtaagtcgacgctgatggccgtgctgtgcggcacccacgcccactatgagggcgaagtgacgatcaacaacctgccggtcaccattcgttcgccgcgggatgctaaacagctggggatccacctggtgcagcaggaggtggacgtggcgctggtgccgggcctgagcattgcggaaaacattatgctggacaggctggcggagccgggcatgaccttccgctggtcgcgggttcggcagctggcgcgcgaggcgctggcgcagctggacgtggcgctggacgtccggcgctccattgacagctgcacgctcgccgaaaaacagcaaatcctgctggcccgcgccctgtcgcaccattgccgctttttgatcctcgatgaacccactgcgccgttggatcagcatgaaagtgagcgtctgtttgcggtagtacgccgtctgcagcatcaggggatcggggtggtgtttatttcgcatcgtatccatgagctgaaggcgatctgcgacaccctgacggtgctgcgcgacgggcggctgattgagagcggcccgatggggccgctgagcggcgaacagatcgtcgaaaagatgctgggccacgagctgagcgatatcttcccgccgccgcgcccgccgcacggcgaagaggtgctgttgcaggttgacggtctgcatgatgaggcgttgctgcaggatatttcgctgcgcctgcggaagggggaaattctgggtatcgccgggctggccggcgcgggcaaaaccgagctgtgcaaagcgctgttcggcgccagcaaaagccgggtgcagcgtggcgagctgaacggccagccgtggcgaccgcgcgatccggccgactcggtggggcgcggcctggcgctggtcccggaggagcgacgcaaagagggcattttcattgaagagccgatcgcgatgaacctggcggtcagcgccgataacagcttttcgcgctggagcctgttcggccatcggcaggcctggcgctgggcggaggaggtgattgcccgcctcggcgtgcgcgctaccggtcccggtcagacgctgcgccgtctttctggcggcaaccagcagaaggtggccattggcaaatggctgcgcggtgatgccaacgttttgatttttgacgaaccgaccaaaggggtcgatgtgaaagcgaaaaccgatctgttcatgctgatcgatggtctggcgcgggaaggcaaaggggtgatttatgcctcgggtgaattcgccgagctggtcggtttatgcgaccgcatctgcgtactgtgggacggacggatcgtagcggagatccccggcgcggaagcccgggaagagacactgctttattattcaaccggaggagcggcagcgtgagcaaggccctggcagtgaacgcgacggtatcgggccgtcagcgattttttgattttctctataagtggggcatgttgctgaccgtggtgctgctggtggcggtctttggcctcgcctcggacaacttccttgacccgttcaacatcatcaacattctgcgctcgatcgccatcgtgacggtgattgccattggggtgtcgatttccctcaccatcggcggcttcgatctgtccgtcggatcgacggcatcgctggctaacgcgctggtgatttccctgtttgtctggcatggcctggggaccaccgaagcgattctgataaccctcgcgctctgcaccctggtggggctgtttaacgcctttctgatcgtggttctgcgcattcctgacatgctcgccaccctggccagcctgtttgtgattcagggcgtggcaatgacatacagctacggtgggtcgattaccgaaaacatggtgctgccgagcggcgagatggcggagggtactatcccggcggcctttggcgcgctggggcaggtgccgaccatcgtcattatcatgctggtggtgacgctggtcgcccagctcgcgctgtcgttcaccacccacggacggcggatgtacgccatcggcggcaacccggaggcggcgcggctctccggcctgcggatcacgcgttacaaagtcgcagcatacgtgattgcctcgctgctggccgggctcggcggcattctgctggcctcgcgcatcggctcttcgcaggtcaacgccggcggcggctatctgatggacgcggtggccgcggcctggatcggcttttcgctggcgggctccggcaaaccaaacgccctgggaacgctggtgggggcggtgatcctcggcgtgctctccaacgggctggtgatgctctcggtgccgtattacgcgatggacattattaaagggttggtgctggctggcgcgctggcactgacctattttcagcgccgtacttaacattttacagggtaaaccgcatgaaaaagatcgcactctctctgatgacgctgggtctgctgcagtcgacggcggcgctggccaccgccccgacgccggtgccggcggcgattgccgaacacaacggcccgatccgcattgccgtgatccgcaacctcgggtctgacgataacaccacccagtttgtcgccggggcgctgcaggaaggcaaaaagctcggtttcaaaatcagcaccttcctgagcaacggcgatgacgccaaattccaggacttcgtcaaccaggccatcagccagaaatacgatggcattattctctcccaggggcgtgacccgtattccaccgccctggtgaagaaggcggtggacgccgggatcaaagtggcggtgttcgataccgcggtaagcggtgagatccccggggtgacggtcagccagcaggatgacgcctcactgaccgagctctcctttggccagctggtgaaagacttcaacggtaaggccaatatcgtcaagctgtgggtggcgggcttcccgccgatggagcgccgtcaggcggcttaccagacgctgctgaagcaaaacccggggattaaagagctggagtcgatcggcgccgtgtcatccgatgtgcagggcgacactgccaacaaggtgggggcgatcctcgccaagtatccgaaagggaaaattgacgcgatctggggcacctgggatgcctttagccagggagcctataaagcgctgaaagagaacggccgcaccgagatcaaactctacagcattgatatttccaaccaggatttgcagctgatgcgcgaggccggcagcccgtggaaggtgagcgtggcggtggatccgaagcttatcggcgcgaccaacgtgcggctgatcgccaataagatcgccggcgagccgacgccagccacctacgacttcaaggcggcagcgattccccaggcgctgctggcggcccagccgggagcggtaaacgtggcgtcgctggggaaaattatccctggctggggccagaccgaagactttatcgcgccgtggttcgcgacgctggaagcgaagaacaaataaaatcaagccgggtggcggtgggcggcggcctggtgccctcgccccggccctctccgtagggagagggggaaaaccatgccaccgggcgagagggatcccctatgtcagcattaccttcccccgaatacagccgcaatatgcggctgattggccatagcgatcagggcggtcgtccggacggcgtgcagctgatggtgcaccgcggattcgcctatatcggccatatggtgtcgcagggtttttccgtggtcgatgttcgcgatccgacccggcccaccaccgtcaactatattgccgcgccgccgggcacctggaacgtgcatctccaggcgcatgacgatctgctgctggtgatcaacgcccgggatctgtttgctgacgcccgttttgctgatgagaaggtgtactacacccgctcggtgggtgacacggtcagcgatgtgcaggacaagggatggagcgccgggctgcgcatctttgatatttccactcccgcgcagccgcgggaaatcagtttcctgtcgcttaacggcatcggtattcaccgcatctggtacgtcggcgggcgctgggcgtatgtgtctgcgctgatcgacggttttaccgactacatcttcctgaccatcgatctggccgatccgcgtaagcccaaagtggccgggcgctggtggctgccggggatgcaccaggcgggcggtgaaacaccggactggccgcagggcaaacgctatgcgctgcatcacgccattattgccggggataccgcctacggcagctggcgcgacggcggcctgacgctgctggatgtcaaagaccgtacccagccgaggctgattagtcatcgcaactggagcccgccgttcggcggcggaacgcataccgcgctgccgctgccggatcgtgacctgctggtggtgctggatgaagcggtgctcgacaaccaggaggacggcgagaagctgatctggctgtttgatatccgcgagccaaccaacccggtgagcatcgccaccttcccgccgccggatgaagcggattatgtggcgaaaggggcgcatttcggtccgcacaacctgcatgagaatcgtcccggcagctttgtcagctcaacgctgatttttgccacgtatcagaatgccggcgtgcgggcttacgacatttccaacccgtatcgtccgctggagaccggggcgctggtgccggctgcgcctgagagaatgatggatatccgtcccggccgcccgcgggtgatccagtcctgtgacgtgtttgtcgatgcgcaaggcattatctacagcaccgattacaacggcgggctgtcggtgattgagtatctggggtgagggtaaggtaaacgcaaaattgtactcgcatgtctgccgggtggcggctttcgccttacccggcctacgaaagagtgcaagatcaaaccgttatgcggctatttgtaggcccggcaagcgcagcgccgccgggcaatccccgaaaatagcacttttttagggggggctccctctccctgtgggagagggttggggtgagggaaacaggcgcattcagctgtactggcgtacccgcgccagcagctcgtcgacgctgtcgatacgctcggccagcacgatcagcgctctgcccagggtaatggcgtggcgcaggcactcatgacgcatggcgtcgtcctggatagtgtcgatatccgcgacgtgcgacagtccgacgctgcggcggatcagttcgctgccgcagaagccgaccgcgtccgcccagactttcttcagaaaggcggaggcgtagccggggtaagccagcgccgcgtcgcgggttttctccgccgccagcgcctggaagcgctcggcgaaggtggtccacagctggtggatgtcgttcagccgctgctcgcgcgcggcggcggcatcgcgaatgccgagctggcccggcaggccgcagtagttcagcagcaggttgccgatggcggtgccgatatcgaagccgatggggccgaagtagccgaactcggcgtcgatggccttcaggctaccttcggcaacgaagatcgacccgctgtggatatcgccgtgcagcagcgcttccgcatgggcaaagaaacggtgcttcagcgccgccaccgccagcttaagctgggcgtcgtcgcgcagggcggcgacatcggcctccagctccgccgggtagttattgcgctcgtggatctgatacgggtcgttaaagaacagatcctcggtgatctcgcacatcgccgggttaataaactgcgccacctgcgcctttttctcgtggggatggaggtagaaatcgctggtgtggaacaacacctgcgccagatagtcgccaagctggcgggccgcctggggatagtagacgttagcgataagctctccgcgccagatgcggtggtcggaaagatcttccatcaccatcaccgccagctcgggatcaaagtgatggatttttaccgtgtgctgcgggctgtgctgatagtgggcgaccagggtctgcgcttcgagacgggcgcggtcgagggtcagcggccaggattcgccgacgcagcgcacgtagggcagggcctgtttgacgatcgcccggctgacgccctgacgatcgaacactttaaacaccagattgaggttgccatcgcccacttcctgcgcgctgaccagctcagatgggttgtcgatgccggcgaactgttgcgcgtaagccacggcatcgtgggcggtgaaggtatggtattgcgacattgcctcgatcctcgaattctgattaagccgttcagacgtctatacttctggattccatcctgacacaatgtgatacaacaacgcaacagggatttaacgacatgcagacattacagaccaccagcctgcgggtgagtgaaaatcagctttttattctcgaccagcaggccttgccgcaggaaaaacgctggctggcggcggataacgttgcgctgctggtggaccatattcataccctgcgggtgcgcggcgcgccgctgattggcctgtccgccagcctgctgctggctctgctggcccagcgcggcctgaaccgggatgcactccagcaggcgctggagacgctgcgcgcggcgcggccgacggcggtcaacctgatgaataatctggatcgcatgaagcaggcgctggccctggaggattacccgcaggcgctggaagcggaagccttgcgtctggtcgaagaagataaacagttgtgcgaccgcatcgctgaggcgggcagtgcgctggtgaagcccggcagtcgactgctgacccactgcaacaccggtggcctggcgaccgccggggtagggaccgccctgggcgttatcgcgctggcgcaccggcagggaaaagtgaccaacgtatgggttgatgaaacccggccgctgctgcagggcggtcgtttaaccgcctgggagctgggcgagctgggcgtgccctatcagctgatcgccgattcaatggccgccagcctgatggcgcaggggcaggtggatgcggtgtgggtcggcgccgaccgtatcgccgccaacggcgacgtggcgaataaaatcggcacctattctctggcggttttggcccattatcaccagatcccgttttacgtcgctgccccgcagaccaccctcgaccgccattgcccgaacggggcggcgatccccattgagcagcgcgcggcggcggaagtgaccggagtggcgggcagcttcggcgcggtacagtgggcgccgacgggggccgccgtttacaatccggcgttcgacgtcacgcctgctgggctgataagcggctgggtgctggacagcggggtggtcaccccggcgcaggtcgccgccggggcgtttgcgccggacaacggataacggacgtcgtgccgggcctggaaaaaaaggttttcccgggcccggacaaacaccgcgccgctacggcaggaccatggctaccgccggggcggatgaccggtcgatacgctgacccagcgcggtgatggccgcctggaagggacacagcgtaccgacgtcggtctgacggcagcccggctgatgccactcctgacgcagcatcgggtgctgcgcgtccggcgtctgcagacgacgcaggtcgtcgaggccctgggcctggaaatagacccgcagatagcgttctccgctcttcgcgttgcgccagcgctccagcaccaggctactgcccggcgggatatttccccggctgtagcccggcagctgccagctaaagttcatcagcgtgcgcaccatggcgatattggtgtcatgggccaccagcagcagccagcgtacgttcggatccgcctccggtttgacgccatcgagcatagcgttgagcagcaccgacccgcgtttttgcgcggtatacaacacatcgttactcagatcgtagttttccgttaacagcggcagcagggcggtgatctgcctggcctgggtgatcttgccccacgccagctggctgagaggcaggttttcactccagccgagacgcagcgtctccaccatattggccatcacgctcagtccgctaatggtggtcttcccacttttgctctgctcgacctgccacggggtatcgaagatcgggcagggcttatcggcctgacaaaccgcctgtttcaatagctggatggtcggcgccagcgcctgccgacgctgcgccagatccccggccttctctttcaccgccgccagctggcgggcggggtcggtttgcgtggcggcgaacttgtcggtctgaaacaggggatcggcatccccgctgacataatggatagcgacgccgcagccggggaaggcgccatccaccagcgcctgggcggtcgctcgcgtacgctgcagcgggctggcgcgcacgtatatcgactccgccgtcgggcatccggcctgcagcaggccgagctggcggtaatgctggccttccgcacgccctttgttgaccacggcggcatagccatggccggtgagctccccgtcatgggtggtccactcggtccacggtcggccggtggcggcctcgatggcttcccggttgccggccgtcggcggacgaataccgtggcggctgagctcgaccactttctccagctgccagtccgcggcggcggcagattgcagcgccagcagcggcagcgcgcaggcgataaacaggcgtaacagcccctgatgtcttgcaggcatcatatcttcttccttattcgttaatcggttatgaggagaacgaggtctgccgttcgacggcatggcgccgggcgacgatggcggcagtggtaaaacagagtagcgcggaacccagaccggtacccacccagaacagcgccaacgtgctgaaatcatacagcgttttgccgttttcaaggatagccgttttatcaataatgatcccggtgagaaactcgcccaggccggcgccggcgtagctggcgatgccgatggtgccgagcgcggccccggcggccttgcgcgaagagatatcgacggcgatcagcccgccaaggaagcaggtcagagcgccaatggtggccccgaagataatcatcgccagaatatcagtgtagtaattgtgcggcgaccagagcatcagggcgaagccggcggtgttcagcaggctgatgaatccggccatcacgctgcggttgcgcgggaaaaagcggtcggagagcatgccggcgatgatggtcccggcgatgccggcgatagcgttgacgccgataatcccggacgcctccagggtggaataagctttatcctgctccagaaagaagatcccccaggagttgacggcgtagcggtcgatgtacataaaggcggaggcgagggcgagggtccacagcgccgggttacgcagcgccagcagctggtttttaaacaccgagccgcgggcttcgacctcttcctgcggttcatcgcggatgacgttgatggacgggaagccgctgctctgcggcgaatcgtgcatgaacagcaccagcagcaccacgccggcggcgccgagcgcggcggtggacaggtagcccatctgccagccaaacccggcgatcaccgcggcgatcaccatataggtcaccgcctcgccgatattatgcgccgtcgaccagatgccatagaaggtgccgcgctccttaacgccgtaccagcgcgccagcgagaccgcgcaggggccgacgcccatcgactgcgcccagccgttgatcccccagaagatggccagcagcagggcgttggtggtcatccccatcatcaggttcatcccggcgctgagcaataaaccgaggctcatatagcgcaccacgttggcgtgatcggcgataaaaccattgaccagtttgccgatggcgtagctgaagaacagggtagagccgatcatgccgagctccgtcggggtgatccccagctccaccagcgcgcttttggcgacggtgaaggataaccggcagacgtaaaaggtgacgtaggccagggtcatggcgataaaggtttgccagcgcacccggcgaaaacggtgttcatcaaacgcggcgcccgctttcggcggcgacgcccggaaaaaagcgataattccagacataggtggttctccgcaggtcggaggcctgactgattgatgtggttcgtccgtgaatgaagttatcgttactgtgtagagtacataatcagaaatagcctgacccgtaagggttaatgtaatggttgtgggatcatctttttcagctgcgggtagagcgttgggctggccagcagcagcggattgccgcgctggatcccctcctgcgccagaaaatcgttgctggcgccgcccgcttcgcgcatcagcaccagccccggcagggcgtcccacgggttcatgtgcggctcgtagtagccaatcaaccggcccgccgccgcccaggcgctcatcaacgccccggagccgttgcggataaacatgccgccgtcgctgagcagcgcctgcagaaacggcagaaagtccgccggggtgacgcgatgcgaggtgccgacgcccatcacgccctctttgaccgtcgtcgccgggtgcggacggatcggagcgtcgttgagccaggcgccatggccccgcagggcgtgaaacagctcccgatggttggggtcgtagaccacgccgatgaccggttcgccgtcggcgacgatcgccagcgacaggcaccaggtgtgcaggccgttgaggaaacagctggtgccatcgatggggtcgaccacccacagcactcgcgcgtcgggcaggcgagcgccgctctcttcgccgagaaaaccatcctccggaaacgcgctctgaatgcgctgtttgacaaaggcctccacccgcttatcggccacgctgaccacatcctgcaggtcgtcgcccttatggtcgacagtcaacgcctcgcgctgttgatagtattcaaacgccagctcagcccccgctttcgccagctcgcaggccagacggtagcgggcctgtagcgcttctgattcctgagattgcatagtgactccctattttgcacacgtgtgcattttgcgtgaaaaaaacagccccgaagggccgaatgagtgtggccgggtttcgcagaagattctgtgatcgctccagcataaaatgattttttcatttcgcactatgacgaacaattagtttcaccggcacttcgcgatggcgcgagggcaggctgaagcgggcgatccgcgtcattaacaaatccaccgcgtggtgggccagcagggcggtattctgctgaacggtggtgagctgatagggctgccagtccgcctgcgggatatcgtcaaagccgacgatggccggcagcggggcggcggcgtcccgcaggccgtcctgggcgcccagcgccagcatatcggtggcgcaaaacagcgcctgcatcccggggttttcagcaaccaattctctggcagcctggtagccggcttgatagccgccgctgtcgcagaagcggctgctcaccgccatatccgacgtccgggcgataaaagcctcatagcgctggcgggtgctgaagttctcgcgattttcgccaataaagccaacctgccgccagcctcggcggctgaacagatccgccaccagcttcgctccctgggcgttatcgctgcacacccggtcgcagccggcgaggtccgcatggcggttgatcagggtgacggggatcttgcgcgccagatactcttccgccagcgacagcggcggcgcgccggaggtgatgatcaccccggcgacgtgatagctcagcagttgtttaagcgagggggcgagctgctgcggatcgtcagcgttcatcagcagcggcataaagccattgagcgccagctgatggaccagcggcgccagtagtttgctgcgaaacgggttgtcgaaaccggcggtgacgatgccgataaaattactgctgccggtgatcatcgtccgggcgatgatattcacctgatagcccagggcttccgcggcgctcagcaccttctgccgggtcttctccgacaccgaggcgccgggggtgaaggtgcgggagaccgccgagcgcgagacgccggccagtctggccacgtcctcggccttaatccattttttatcgctcatcgtcgtttcgcgccgtctgttttccaggatgccgacgcccgggcgggcgtcggtcacgcacactgcctgaaaaggtatcacagaaaggcgtcgtcgcgcagcgccttgcgccctatgccgggtagcggatgtgctccacctcacgctgcaaaatcaccttgccgtggcgaatggaggtcagcacccgtgcctgacggcggacggcctcgtagtcgttttccgcatcgaggatcagcaggttcgccgggcggccttcggcgaggccgtagttatcgcccagacacagcgcccgggcgctgttgtcggtgacgaagtcgagacagcgctgcagatcgtcatagccgagcatatggcagatgtgcagcccggcatccagaatgcgcaggatattgccgttccccagcgggtaccacggatcctgaatcgagtcctgggcaaagcagacgttgatgccggcgcgatccagctccgccacccgggtgacgccgcgccgtttcggccagctgtcaaaccggccctgcagatgaatgctttcggtcgggcaggagatgaagttgatgcccgaggctttcagcaggcgaaacagctttgagcagtaggcgttatcataagagcccatcgcgcaggtgtggctggcggtgacctgggcccccatgccgcgcacccgcgcctcctccgccagcacttcgaggaaacgcgactgcggatcgtcgatttcatcgcagtggacatccaccaggcggccgtagcgctgggcgaggtccatcaaaaacatcaccgagctgacccctttgtcgcgggtgttctcatagtgcggaatgccgcccaccacgtcggcgcccatctcgatggcgcgcgtcatcagctcccggccgttgggatacgattcgattccctcctgcggaaaggcgacaatctgcagatcgatgagatcggcggcctcttgtttcaccgccagcagcgcctgcagggccgccagcgacgggtcggtgacatccacatgggtgcggacgtgctggaccccgaaatcgcgcagcatgccgatggttttcagcgcccgctggcgggtgtcctccggggtaatactcgctttgcgctggctccagcgggtgatgccttcaaacagggtgccgctgcggttccactccggctcacccgcggtgagggtggcgtcaagatggatatgcggctcgacgaagggcgggatcgccagccggccctgggcgtcgatagccccggcgtcggcagtctgcatcgcggcctgggcggtgatgcggtgaattatcccgtcctgcaggtcaagggtaaacagcgcctcctggcggcgcaggcgagcgttaataattttcatggtgggtcctgtaaatggttttgcgataaacgccagatcaccagcgcgaccgaggcgttgagatgaaactgagggtggctgaccgggtagccggtcagtttttcaatgcgctggatgcgctgatgcaacgtgttgcgatggagacccagccggtcggcggcccgcaccacgttgccgttctcctgcagcagcgtctcgagggtctccagcagcagccacggcgctttacggcccggctcgatcaggcagccgagggtgtcgtgcataaaatcgttgagcagcgccgggtcgctgaccgcggacagcagtttgataaaccccagctgctgatagtcgctgatgcgctgggttggccgcagggtatcgcacagatccagcgcctggcgcgcctgcgacagcgcccgcgggtaaccctgcagctgcctgaccggcgcggagaggccgcagagcagcgacaaactctcctctccgtccgccagcgcctgcagccactgctgtagccattttttctgctgaaagccttccccctcctcatccggcagcaggaaaaggaacatgttgctgcgctccagcagcggaaaggaattgccctgctggttgagctgctgctgcagctgctgacgcacgctgcggtgggcctgcagcagccaggcttcggcctgctcgggcgggaactggcgaaacaggcgggacaacccctccagacgcagcgccgccagccgcagcggacgggtaaaatcgagctgctggtgcagggcgcgctgatggagcatctgcaggtccggatagtcgccggtgaccagctgcatcagaatgtcgcgctgcgactgcaggacgttttcgctgcggaccagcgcggtgccgatgcgctcggtgacaatcaccatcttcagcaggtagggctgctcgatcagcggcatgcccagctcgtcggcaagggcgatcagcgtggcgggaatggcgtggatataggcctcgccggtgaggatcaccatcccggcgatgccgcgctgtttgccctccatcagcaactggatcaggttggcttcatcccggggatggttgatgccggtgataaacaccagctcgccgcccatgatccactcggcgatatgttcattttccgccacatagtaccagcgtacggcccgctgcagcccttgctttcccgcccgcagacgcagggcggagagtccctcaagggccagcagttcgctgaccgtcaggctcatggctcctgctccgcgacggcggcaggctggcgtttgcttagcagagtcagggcgatatagaccagcgcggaaacggagatccccaccagcggcgcgatccacggcgaaagataggccaccaccgcgccggcggcgtaggcgccgagtcccagccagttaaaacgcggcaggcgggcgttctgcagcaggggatagcgcccgccgcgggcgaaccagtagtcggcgaggatcaccccgccgatgggcggaataatactgcccagcagcacgaggaaggggatcagcatttcgtacatcccgccaatggccagcacaatgcccaccccggcggcggcgagggtcagcgtccggcgacgttcgctgcgcagcagatggcaggcggcggcggagacgttatagatggtggggccctggatggtcagcaggttgagacagagcatgatcaccgcggccaccgacagcccctgcaggatcagcacttcaacgatatcggcctgttgatagacgatagcgcaccaggcgccggcgacgatcatcagcccgttgccgatgaggaagctgcccatgctggcgagaatggcggtccggctggagttggccagccgggtccagtttgtcgcctgggtggcgccgctggcgaaagtgccgaagaccatggtgatggccgccgaccaggtcatggtgtcgctcggcgcaatacgggtcatcgcctgccagccgccggcgtggtgcagcgccagatacatggagaccatcagcagcacaaacatcaatggcaccgacaggcgcgacagcgcgtccagccccttgtagcccaccagcgcggtgacgcagaacagaataccaaacagcaccatcaacggctgggttagcgcctcgggcagagcgaggatcttcaccaacgagatagcgaccgtggcggtgccccaggcgtaccagcccagctcggcaaagccaagaataaaatcggccagcttgctgccaatctccccgaagcagaagcggcccatcagcaccgtattcaggccgctgcgcgcggcgatccagcccagcgacgcggcatagagggccagcaaggcgttgccgatgacggctatccacagcagattgacgatggaaaaggagacgccgagtttaccgccggcgaacatcgtgccggtgaaaaaggtaaagctgaacaacaccatggcgatggaaaatacgcctttgcgtccggcggcgggcgcttcgacgaggggaaaatcattgctgtttgacatcctggaacctctggctggtagatgggcggtgatagccggaagtagcaagagatgtgccaggaaaaaccgggcacggggaatagcgcgcggtgtgcaacatgcacagttattgaaggatccaggaggggtaatgccattctactgtgcatcctgccaggttttgcaccagtccagggcagagtagggcggtgagcgcatccctggcgccggaggagaattttagccaggacgatccgcctgtttttggccagagagtagtggagaatagtggtgtactgaaaacggttggttaaatcactgtgaataaaggttatttaatatgcttttatgatataaccatttgtcttgtgtgtgtttcctgaaatattgtcccctccggttagcggtgttagtatcggataaatagccatttagacggctaaataaatcatcgctaacctaaggaactgctatgtggcaagaaagactcgcgcaactggtcaccacctgtcattggatcggcgcgaaaggctgggcgccggcgaccggcggcaatatgtcggtgcgtcaggatgatacctggtgctggctaagcgagtcgggccgcgacaaaggcagcctgacaaccgaggattttctgcaggttgagatcgccaccaaccaggcgccttccggacggaagccgtcggccgagaccggtctgcacaccctggtgtatcgcctgttcccggaagccaacgtggtgctgcatgtgcataccgtcaacgccactgtgctgtcgcgcatcgaaaaaagcgacacgctggcgctgcaggggtatgaaatgcagaaaacccttagcgggcagcatagccatctcgatactgttccgatcgccatcttcgataatgaccaggatattgacgccctggcggcgcggattgccgattatgcgcaaacgcgcccgctgcgctacggctttctgctgcgcggccacggcctgacctgctgggggaaagatattcaggaggcccgccgtcaactggaggggctggagttcctgttcgagtgcgagctgatgcgccgccgctacgagccctgagccggagcaggtatggatttttatcttggtatcgatattggcacctcgcgggtgaaagcggtgctgtttgatcagcatttcaccgcctgcgccagcgccgcggaaaatacctcaccccgcctgtcggccaatggctacgcggaacaggatatgacccagctgtggcattcggtgctggctattctgcgccagattgcccgccatccggcgctacaggcggggcggctgcgggctatcggcctcgccgggcaaggggagggggtctggctcagcgatgatcagggcgaaccggtgggcccggggatcctgtggagcgatacccgcagccacgagctgatgagcgacctgctgcgccgacccggcttcgaccgccgctatttcgccgataccggcacccacctgcagccctgcaataccagcctgcagctgtactggctgaaacagtatcagccggcgcggctggcggccgcgcgctatctttttttcgccaaggactggatccgctttcgcctgaccggcgtggcggcgctggagctgacggacgccagcagctcgttactcaatcagcagaccggcagctggtcctcggtggtgatgaacgagatggggctgaacgaactgctgccgctgtttcccccgctgctggccccggatgccccggccggcacgctgagcgacgcggtggcggcgctgaccgggctgcccgccgcgacgccggtggccgccggggcgctggatgtctgtagcgccgcgctgggctgcggcgcggtcaacgaaggggatatctacacgatcctcggcaccacctgctgcaccgggatcgtctgccgcggcccgcagacggtgaacgaggcgacgcgctttgtcacccataccgaagccggacaggtgatctccctgtttccgatgcaggccggtatgccaaacattgactggctgcagcagcatatttcgctggacgccgatctggggcgcctggagcaggcgatcgcggcggtggagccaggcagcggcggcgtcttctggcagccgtacctcaatggcgaacgtgcgccgttttacagcccggacgcgcgggccggctttttcggcattagcccgcacaccacccgcgccgaactgcagcgcgcggtgtttgaaggcctggccttcgccattgtcgatgcgctgcagggttatccgcagggcggcgagctgtatctgacgggcggcggcgcagcctcggcgacctggctgcagattatcgccgactgtaccggacgcacggtggtctccagcgcctttaacgaactgagcgcgcgcggcgcggcgatcctggcggcccgtagcgtcgcggcgctggccgagacgcctccgctggcgcagacccgctatcagccgcgccctcaagcgcatgcccgctacgcggcgctgtatcccgtttaccgcctgctgcgcgagcagatgctgccggtatggcaggccagacaggccgcccttcaacctcttcctcaggacctacaaccatgaaaatcgtttttaccgccgagcatgctggcgaccttagcgccttccaccagctgggcgagctgctggtggaggggtgggcgctgggcaaaccgaaactcagcgccggtcagctgattgagctggcccacgacgccgaggtgctggtgaccagctatgatgaggtgacggacgcggtgatggccgcctgtccgcgcctgcaggtgatcgcctgcacccgcgcgaatccggtgaatattgatacccaggccgcccaggcgcgcggcatccgggtgctctacaccccggggcgcaatgccgatgccgccgcggagctgacgcttggcctgatgctcagcctggcgcgccatattccgcaatcccatgcggcgctgaagcggggggaattcacgcaggctgacaatgccgccgccgccactcagcagggtctgcggcgggatgtggtctgggacgtgagcccggaaagcccctatgaagtgtttaaaggcagtgaactgcgcaataaaacgctggggctggtggggtatggcaacattggccgccgggtggcgcgtatcgcccgggcgttcggcatggcggtgttggtggtggatccgttcgtcgccgcagaggatatcaatgagccagggctacagaaaacgaccctggaggcgctgttccgcgaggcggatatcgtcagcctgcacctgagcagcgggccgcacagcgacgggctggtgaatgccgcgctgttaaacagtatgaagcccggcgcgctgctgatcaatacctctcgcgcggcggtggtcgacgaggcagcgctgattgatgccctgcgccacggcccgctgggcggcgcggcgctggatgtctatcaccgcgaaccgctgtggcgcgatcatccttttgtcatcgagttcgataacgtgattatcacgccgcatatcgccggagccacccgggagagtatcgccaaacacacggcgatgattgccgccgatcttcagcgctatgtcgccggggagccgctgctgtaccagtggcgttaagccgcttgcgccgccgcgttctgcagcggcgcgggtccatcgtcaggggcgatgggccgccataaaagcctgggtctgttcccagtccactcccccggcatccgatcccatcccggtcgccaccagcgcggccaccgccgaggcgacgtcacacgctgctttcacgctgagtccgcgcgccagtgcggcaataaacccgccgcagtagctgtcgccgcagccggtggtatccaccgcctcgaccggccacggcgcaatatgctgcggcccgccatcgcggccgataagccaggagccgttctcgccgtctttcagaatgcaggtgcccacgccgagcgccaggaagaagtggccgatggcctccggctgcgtctctccggagagaaaggcggcttcctccagcgaaggcatgaaataatccaccgacggcaacaggggccgcagtagttcgagggtctcttcattcggggcgataaggtcaaagctggtggtgactccgcgcgctttggccgcctgcaacagccgcgcgctctgtccctggtccattgccgccagcagcccggtcccgccgtgatgcaggaaacgacagtcaaggacggcgtcaaattccgcttcactgacaaacagggcgtcagacgcgccccggcagtgcagggccggacgttcgccgttggggcgaatcggcaggatcgtcgccgaggtctccttcagcgcggtgcgctggataagcgagcagtcgatgcccagccgggcatagctggcgaggataaagtcggccttttcatcttcgcccaggcaggccaccgctgcggtgcggatcccgagcttcgcggcgttgatattagccccggcggcggtgccggcggggttgagacgaatttgctcaataaaggcgacgccgccgcgcggcgggatcgccaccaccgggcgcccggcgatatccagaatagtcaggccgacaaatacggcgtcaaaggttgccatcgttctcccgtttagcgatgcgtttggcgcaggcgcgcctgccagaaggatagggcgagggccaccaccagaatcacgccgaccagcgcgtccttcaccagataattgagccccatcaggttcaggccgttatcaataatggcaaggaacagcacgccgccgagggtgccgagggtgctgacccggcccagacgggtaaaggcagtgccgataaatactgccgcaatggcgtccatcagataagactgcccggccagcggggtaaactgccgcaggttggcggagaggatcaccccgccgacggcgcagagcgccgaggcggccaccagcacgccgagcatggtcaggcgatcgcggatcccggcgatacgcgccgcttcgctgttctgaccgatggcgcggacatatttgccccacagggtgcgctcggtaaccagccaggccgccagccacagcgccagcacgatcgctaccggcgtggggatcccgccaaggttgcccaccgccaggtcgtgatactccggggccatccgccgataggctatcgcgccgccgccgtcggtatagatgcgctcggcgctgctggcgataaaccaggtgccgagcgtggcgaggaagggacggatccggcagatgaggatcagaaaggcattgagcaggccaatcagcacgccgccgagcagagcgcagcccaccgcggcctgccacggcagatgccaggttttcagggcgacgagggcgaaggcggcgccgaaatcgagcgcgacgcccaccgacagatcaatcgccccggcgctgacgatcagggtcatcgccatcgccacaatcagcaggatcgcgctgccctgcagcaggttggcccagttatccacggttaaaaataccggattcgcccagccaaacagggcgatggccagcaggatgatgacgccaaatccggcccgcgacagccaggccagcgggctgctggccgtctgttccgccgacgcagaggttttcagagtgatttgactcatgcctcgcctcctttgtgtctgaccgccgaggccgccagcaccaccaggatcaggccgcctttaatggcgcccatccagaagatattgacccccagcaggccgagcccgttagagagggcgttgaccaggattgcccccagcagcgcgccccagatggtgaccacccgacggcgcgagaaggcggcgccgataaaggtcgccagcacggtctccagcagcagcggcgtggccgtcccgcttgagctgccggagccctggctgagcagcggcagaatagccagcccggcggcaatgcccgctaacagccagaccagcagggtcaagcggcgcacgttcaggccgctcatctgcgccatatcgcgattgccgcccaccgcctgcacatgctggccgaagcgggagtggtggagcaggaactggaacaggataaacacccccagcaggtagaccagcggccagggcaggcccagcacgctgttgtcgcgaaaggcgaccatcagcggatcgctgaccgcgatgcgccgctggccggtcaacagatctgtcagaccggtaaacgccaccgaggtcgagagggtggccagcagcggcggcaggccggccgccagcaccagcaagccattgatcgccccgcacagcaggcaaaccgccgccagcagcgccagcagcaggagatatggcgtgtgccattcggccagcccgaggctgagcagcgcgacgccgagcaccgccgtcgccggcagggagaggtcgatgccgccggagaccacgtcatctccgcccacggcgataacgcagaccaggccgaaacagaggattgccagcggaacgctctggaccagcatcaggctgatattttgccagctgagaaagtagggcgactgtacgctcagccataccagcagcgccagaaacaggatcaggggaaatttttcaatcagcgtcgccaggcccggacggccgcgacgctggatagcagtactcatggtgaaggctcctgtccgccgttgatcgccaccagcagggcgtccagcgttagcccgcgggtgggcagattggccgccagcgcgccgcgccagaggaccaggatccggtcgcatagtccgagcagttcgggggcatcgctggaggagaccagcaccgcccgtccttgatcggccagctggcgcgtccgttggtaaatatcgcgacgggcgccgatatcgaccccaagggtgggttcatcgagaataaacagccgggcatcggtccccagccagcgggcgaggatcgctttttgctggttgccgccgctcatgtagcgtaccggcagccccggtcgtcccgggcggatcgccagctgttctatccagtcgcgcgctttctgctcggcgataccccgccgctcccagccaaaggtggcggtttccggcagcgaggcgagattaatattgtcggcggtggtgaagggcaggatcagcccctgatggcggcggtcgcgcggcaccagcgccatgccggcgcggatcgcctgctttggcgtacgaatgcgccgcggccggccctcgaggtggatggtgccgcgttccgccgggcgtaagccgtagagtaagtcgaccagcacatcgcgtccggcgcccagcaggccggcgacgccgacgatttcgcccggctgaatatcaaaagaaagatcctgcagctgccgcccgtcgctcagctggcgcaccgagagcagcggggttgccccattgtctgccgccgggcgctggcgcggagtatacagctggtcgatttcccggccgaccatcatggcgatcagcgcttcggtattctgcagcaggtcgcggtccgggtagccgaccacttccccgttgcgcagcacggtgccgcggtcgcagagggtggctatctcattgaggtagtgggaaatatacagaatggcaatgccctggtcgcgcaggcgcaggatagcggaggagaccagactggcctcctgcgcctccaggggggcggtgggctcgtcgaacactaccagccgcgccgcgccgtcgatcagcgcgcgggcaatctgcaccagcttgcgctcggccaggctcaggtcgcgcaccagccgttcggggtcgatcgccagctgccagttttgctggaaaaattgcgccgtggcggccttcatccgtcggtgatccagcgccccccagcgggtgcgatactcctggcccagaaacaccgattccgcgacggtaaagtgcgggatcaggttcagctcctggtggataacgcggatgccggcggcttcgatggctgccggattgccgaggggcagcgggtgaccgtcgagggtggcgctgccgctgtcggcctgatagacaccggcgaggatcttgatcagcgtcgatttaccggcgccgttctcgccaatcaggccatgaatctcccccggattgaggcgcagggtaaccgcattaagcgcggtgacgctggcaaaacgtttaccgatctgctccatgaccagaccagcggcggggcgttccccgcctggatgttgattaatcactgcagctcgccgtatcccaactgtttatacaccgctttcgcttcctgcggacctttcaccggaaccaccggaataaaggtttgcaccggtagtttctggccggcaaagtagcgggccacattgtcagccgaggtctggccgatcagatgcggctgctgcgcgacgttagccacgaacgggctgccgggctccgccatgatctccagggtctccggaccggcgtcgatggccgtcactttcacgtctttatcgcgacctgtctcttccagcgcctggacgatgccgatggccggttgatcccagcaggcgacatggatggcgtccagtttgcctttcggatactggctgagtaattcgagggttttcttgcgcgcgtcttccggcgagttggcgaactgttccgcgagctcgggctggataatatgaatatccggataatccttaaggacatatttccactgatcgtagcgaattccgcaaatacgcagcgcgctggagaacgcgttaaatacggcgacgttgcctttgccgcctaattcatccgccatgtagcggccgatggttgagcctaaggtgtagttatcggaagtagtattgttgaccgaatattgagaaacatgatctacggtaaataccgggataccggcatcacgcaatgctttaaattttggttcgacggcgctatcgccgagaatactaattaccgcgtccaccttgcgtgacagtaaaatatcgtggttattggcatgcacctgattatcgcggccgccatcgacgccaatgactttgccccccagcttctccacctcctctgtcgcgcctttaaaggcctcgcgatcccagaaatgctgagtgccgaccacggcaacgccaatggtttttccctgtaaggagagggcgtctgcggcagcgacgctcagcgaggcaagggaaagcagtcccagcgcggcaggcaataattttcttttctgcgacattgttattatgatcctgtgatgaaggtggttgcggaccggtagcatgacaagaagcacctcgccacctcaaatacaaaataagtctaagttatgccaggaatgttatatcgcagaaacgtcagagaaaaagtttattttgtcatgaggaacctgaaaatatttcatgatggcggataggcctttttattttgtggttttatttttgacttattccgtgtttatttagcggataaagacaattttcttaatattgtgagtgcatgggaaatacggcgtctacagagaaaaaaagaagattgcgcgggctaaagctttttttagcagagcaatgtctggccgggtaaggattattaccctatttccccgctttattgtaatgaaccttaagctgagaagaacgcgggcgctatgaagaaacagcataattatacggtgatgcactggggaacctggcaggtggagagcagtgagggcgagatcgtggcggttaagccggtgccctgggataaaaatccctcacgcatcggccagtcgcttcccgacgcggtgaccagccaaacgcgcattcgccgtccggcggtgcgcgccggctatctccagcacgggccggcgtcacgagaagggcgaggtaaagagccctttgtcgaagtcagctgggaggtggccctggacctgctggcgcgcgagctgcgctcggtcaaggcgcgctgcggcaatgaggcgatctacggcggctcctacggctgggccagcgctggacgctttcaccatgcgcagagccagctgcaccggtttctcaagggctttggcgggtacaccgccagcaccaatacctatagcagcgccgcgggcgagcgtattctgccgcatattctcgggccgctgagcccgctgcaccggcagcatacccatttttccgagctggcccgggagtgtcagctgtttgtcgccattggtggtctgccgctgcgcaatgcccaggtcaacggcggcggcgccaatgaccatatgctccagtactggctggataagatgcaggccaacggcacgcggtttatcaatatcagtccggtgcgcaatgacctcagcgcggtgcccgacgccgagtggctggccattcggccgggcaccgataccgcactgctgctggccctgagctatgtgctgatcgctgagtccctttacgaccaggcgtttgttgccagccataccgtcgggtttgccccctatcgcgcttatctgttgggcgagcacgatggcgtggcgaaaaccccggcgtgggcggcggcgattaccggcctggacgcccagcgcatcgccgacctggcgcgggagatggcccgccaccggacgatggtgaatatctcatggtctatccagcgcgcccgtcaaggggagcaggcctactgggcgacggtggccctgactgcgctgctgggacagatcggcacgccgggcggcggtctcgggtttggctacgcctgcactaacctggcgggcgcggtacgaaaagcgttttccggcccgcgcttacccgccggggagaatgcggtggacagcgttatcccggtggcgcggctgtccgatatgctgctgcacccgggagaaacctatgagttcgacggtcagcggcggcgctatcccgatatccgtttagtctactgggcgggaggcaatgcgtttcatcatcatcaggatctcaaccgactgtgcgaggcctggcgccgcccggagacggtggtggtgcatgagcagtactggaccgcgcaggccaaattctccgatatcgttctgccggccaccacctcgctggagcgagaggatatcggcagcggcggtcacgacgggtttatgatcgccatgagcgcgcagatcccgccggtgggcgaagcgcgtgacgattacgccattttctgcgatctcgccgatcggctgggattcggagaagcgttcagcgaagggcgggacgccgggcagtggctgcgtcatctctatgaggagtcaagaccgcgggcgcaggaggagggtattgcgctgccctcgttcgatgacttctggcagcaaggggtgctggagtacagcgcgccggagcggccgcaaatttttctcgccgattttcgcgccgatcctgagcgcaatccgctctccaccccctccggcaaaattgaactcttttccgccaccgtcgccgggtttggctatcgcgaatgtcctggccatccgtggtgggatgaacaggaggccgcccggcagcggcaggaggcggcgcgctggccgcttcatctgctctccagccagccgcgcgcccgcctgcacagtcagtacgaccacggcagcgtcagccgggcgacgaaaattcagggacgcgagccgctgtggatgcatccgagcgatgcgcaggcaagagacatccgcgaaggcagcgtggtgaaggtctataacgaccgcggggcgattctggcgggcgtgcacctgagcgagcagattttgcccggcgtggtacagatgtccaccggcgcctggtatgacccgctggatcccaatgaaaaaggaacgctcgataagcacggtaatcccaatgtgttaaccgaggatcgcggcagttcgcgcctggggcagggctgtagcgcccagagctgctgggtggagatcgccccgtggcgagaggagctgccgccgatcactgcctttgatccgccgaaatttattgaagtttaggcgttggcgctcgccggcggcggggcgggtagcccggagaaggcgcggtatgcgccgcctccggcaaagcccgcgcctggcggttttagactgacgacagtttgacgttacgccagccgcgggtaggcgctggcgatatcgtcaccggtaaactgagcgatccagccttccgggttatcaaaaatgcgaatggcggtgaagttcggttctgatcccatatcaaaccagtgcggagtgtgggcgggaaccgaaatcagatcgttcttttcgcacagcacctggaacacctcgtcgccaatgtgcaggcaaaacaggccagcgccctcgacaaaaaaccgcacctcgtcttcgccatgggtgtgctcgttcaggaacttttcccgcagcgcctctttttgcgggttatcggcgcgcaggctgatgacgtcccagctctggtagcccttttcggcgaccagtttatcaatcgcatgctgataggcggcaatcaccgtttctgggctgggatttgcgccgaggtcgcggtcggcctgccagcgctcgaagcggacgcctttggcgttaagttgatcctgaatcgctttggcgtcggtgctgtgccagaccggcgtttgcggatcggtcacggaaaaaagagttaatgcgctcatgctgggatctgctccggatgaatgtcgtcaaaacgctgaacctgaggatggtggctcgccgggtcgcggtcgccgcgaaccagctgcacagtgcgcaaacccgcggcctcggcggcatcaagttcctgatggatatccgacaggaacaggatggtgccaggggcatggcccaggtgttcagcaatgttacggtaggactgcacctcacgtttggcgcctaccagggtatcgaaatagcccgtgaacagatgagtaatatcaccttcatcgctgtagccaaataacaatttctgcgcagccacggaacctgaggaatatacatacagatcaataccctgcgctttccattgctccagcgccggcagtacgtccgggtagagatggccggtaaagtcgccgttgagatagccgtcgcgccagatgatcccctgcagcgccttcagcgccgtggatttacggtcttcatccataaaggtgaagagggtagtgataaggtcggcggtgctggcggcgggggcgtctgtttcgcggcgcaggttgtcgagaatggttttgaccggttcagcgtgctgctgagcggtcacaaagccggccagtcgttcgcgggcgtaggggaacagcacgttatgcacaaagcggatatcgctggtggtgccttctatgtcggtcacgatggcgcggatcatggtttctccagagtgggcgtagcgtggaataacattagcatttagacgtctaagcgtcttgattgccaaatattaacatcgtgttatagtggcttcaacaacagcattacaatcggtataaaaagaatgaacaataaccccttgattccagagagtaaacttcctgcgctcggcaccacgatttttacccagatgagcgccctggcccagcagcatcaggccataaacctgtcccagggctttcccgattttgacggcccgcgctatctgcaggagcgtctggcgtaccacgtggcgcagggggcgaatcagtacgccccaatgaccggcgtgccggcgctgcgcgaggcgatcgccgggaagacggcggagctgtatggttaccagcccgacgttaacagcgagatcacggtcaccgccggcgcgacggaggccctgtatgcggcgatcaccgccctggtgcgccgcggcgacgaggtgatctgtttcgatcccagctatgacagctacgcccctgcggtggcgctggccggcggcgagttacgtcgtattgcgctgcagccgccgcattttcgcgtcgactggcggcaatttgccgccgccctgagcgagaaaacccggctggtgatcctcaacaccccgcacaacccttcggccaccgtctggcagcgcgaggattttgccgccctgtggcaggcgatcgccgaacgcgagatctatgtcctgagcgatgaagtctatgagcatatctgctttgccgatggcggccacgccagcgtactggcgcatccgcagctgcgcgagcgggcggtggcggtctcttcgtttggcaaaacctttcatatgaccggctggaaggtcggctactgcgtggccccggcggccatcagcgccgaactgcgcaaggtgcaccagtatctgaccttctcggtgaataccccggcgcagctggcgatcgccgacatgctgcgcgaagcgccggagcattatcgtgagctgccggcgttttatcgggaacgtcgcgatctgtttattgaagcgctgcgcccaagccggctggaaatcctgccctgtgaagggacctatttcctgctggcggactacagcgccatctccgatcttgacgatgtcagcttctgccgctggttgaccactgagatcggcgtggcggcgatcccgctctccgtcttctgcgccgatccgttcccgcacaagctgatccgcttgtgcttcgccaaacagccggcgactctgctggctgcggcggcgcgtttgtgccagctgtagttacttaatcgtccacgcctgggagaactggcggccggcgaacatctctgtcaggccgctaatttgcttcagacgcagcacttcatcggcatccatccccagctctttgccgattttctgcggcgtccagccgagctgggtcagctcgcggacgatctctgacatggcgtggatttggtggcgaccgcgcgcccggttatggcgtatggtcgctgccatcagcccgtcacgcgaggcagcttcactcgtcaggcaggtcaccggcaaatagccttttagcgtttttttcagcgcggctttgctgcaggccagctcatggcggtgaaaaccatcgacaatcgtatacgcctgtgggcgttgctggatgacgacgaccggctgggtaaagccgtcggcctccagcgacgtttgcagcagacgcttctccggcggcgccacgttattcgggttgtaatcgttgggggcgaccagctcctgtttgacccacagcacgcagtcgacgggctgcgagcggaaggggctgtagtggtggagcacctggcgaaacgcgttgatagcctcaatgcgcgcctcgtcatccagcttttgcaggtaagcttccagcgcctgcgtcagttgttgttgcataatatcccccattgttggcgatgtttttccatgcgtttacggtagcgctgatagtggctgcttttggttgggctaaacgaaagctgacggcaccagtaatcgttattgagcagtactttgcagactcgccgccaggatgggatatctttggtgccaatgtccgcaggttgggtatccggaatatcctccataccttttttctggtaccagcgcaggtagacggcgattttattgcggtagtgctcggcggtggtttccggcatgctgtcgagcaggaacagggcgtagcttttccacgtcaggtggtcgggcttgtcgattttccgatgaccgtagaactggttatcatgcccggcatagaccccgccgctgtgcgcgccgctcactcgctggcacatcgcggcccagcgctcaggttccagcacgtgatacagccacagcccctggcgctgctcgggaccaaacggttcgcaaatgcgcatatagcgcagcggcaccccggcctgatacatcagatcgtacaacgggttatagggctcgccgcttttggcaaaccaggtccagatatcggcggttttccagtcatagagcgggtagatgtaccaggcatggccgcccggcgctgaagtggtccatggtttatcgtcggcgaagcgctgtttacgctgtgaagaaatcgtcataaagcgatttagcgattcgtcggcgcgaatgcccaccagcacggcggcgggacgacgctgcgaaaaccactcggcgaagtggctgacgaaggcttcaaagctcattccgggttgataaaatgaaaaatagcccgggtgggtaatggcccagggcggcggctggcgtacccactcggttccgggctcccagcattgccattgcggcttatactgcgtcagggcattttgggtggtgagcggcagggcgacccagtaaaaggtttcgatgacatccgcatacagcgcacgcagtttttcacagtgggcgatggtgcaggagaactgcgcttcccagtcaataaacaacacgcagatttttttcccctgtaaccgcgccgcctgggcggttaaatgcagcataacggtggagtcttttcccccggaaaaagagacacagatgcgcgaaaaattatccatgacccactggatccgctgctcagttgcttgcagcaccgattccggtaagggatatttaataaacgacatgaccattaatcctttaatagtagaaaattcccgttagctcagtataaacgatgaggggtaggaaattaatggtcgattattgtttctggcagcgggggaacagaagggcgttattcgctgtgattaaatttgggccgtgatgcctctcgatcattcattaatatggtgattaattcagttaaaaaatgattttgcgaagatgcatggtggtaattaatgtagatcgtgatatccggaaaaagattatctatgttgatggcgtgaagctgcatagtgggtgagataaagtcatataaataggaaggcaaaaagccaattaagtcggttttattaatcatgttaagaatggtcataaaagagtcgctgcgaaaggcaatattgcgcggattcagccaggcgatgctgctttgctgcacgcgctgaataacgggatcgttggtaatatagtgagtgaaaaactcctgcgccagtgactctaccgaggtaagcgtttcgcgtcgcggatggcccgcccggcaaaccgccagcgtctgcaccgtctgatagggctgacagatcgtggcgcggttggtaatgggcatgcgggtgaacaccaggtccgcctggcgatacgccagcagctcctcagccgattcggtggtggtcaggttatggtgctcaatttgcaagttcgcctgatgacagagctggttaatcataacgtggctattgactgaacagaacagcggggggccatatatcacaatacgtttacgcagttctgagcgattattaagattgatggttttttccagctgctccagattttgctgtagatgataatgaagattgacgcaggcggtggtgggcgtcattcctttgccaacacgaacaaatagcggatcgtttaactgctggcgcagacgctgcaacgactgactcaccgctgagggggtgataaataacatcgccgccgctttgctgatgctcaaatgttgatagatacattcgaaaataaccaataaattcaaatcgaactttttcagatcgtaaagatttgccattaatgcagtcctgtttattaccggtgcggattataatattcttaatgataatgttttgtggcttaatatttgcggtgtgaatttaattattggcaaatacagttaagttctgcttaatatatcttatcgtcgacggtggcgccagcggtcgcttccgccaggcgccactgcgggatggaattactctttttcacccatcataatatgcagtttctctttatccggtaggccgaccacctgctgcagcatattatctttattcatataataaatcgccggcgtcacgttggctcccagatcgtccatcagctgctggttgacgttgagcattttcattttctccggcggaattgctttcgggatcgtcagagccattttcccattcgattgctcgtaatcatgccaggttttcgccggatcgctgctggcgagaatcgccgcggcggtggccgggctctccggcttaatcacccccaccagcagagtgcggatctgcactttaccggcctctacccaggggcgggattgctgccagaactgcttgcagtagggacagaagggatcggcaaagacatacagcacgataggggcgtccttgcgaccatcctgcagccagtgtgcgctggccatcttcttccacatctcttgtcccgccggggtatagagttctttctgaaacagctgctcgctgaggttgctgccgttctcatcatacatatagccggagatcgcgtgtttaccatccggcgttaggtagatggcgacccccatgtcctggtatttgcccagccagcctttcattccccccggcgcctcaaagggttttataatggtaatgccctgtttttcaatcgcttttaccggagcggggagttcctccgcatggctgcataacggcaaaaggctgagtaacagcagacgctttaacataagtattccttgtaaaatcagcaggaaagggcaaaacgattgtcgaacctatcacagtcataggcaagatcagcagaatgacggattgccctttgctggcgtgggtgatgtaatcctggatgctgttacattaaggtaatgtagagcgcaacacatagccagtctgactggcgctgaacctaccctcgggtatttcaggtaacggggccgcctgaaaaggtggcctttttacttttgtcgcggcaaatgatgcgaaaaacagcgattagcgctgaacgcgtcgacaggttcacagagttgtcttgttccggttgttagataacgcttattgattcgataatgtaaacgcattggtcgagtcaggaaaaattcgttaacttagacctcaacgaaaacacggaggaagtatagatgtccttaattaacaccaaaatcaaaccgttcaaaaaccaggcattcaaaaatggtgaattcatcgaagtcaccgagaaagacaccgaaggccgctggagcgtcttcttcttctatccggctgacttcaccttcgtctgcccgaccgaactgggcgacgtggctgaccattacgaagaactgcagaagctgggcgtagacgtttactctgtgtctaccgatacccacttcacccacaaagcgtggcacagcagctctgaaaccatcgccaaaatcaaatatgcgatgatcggcgacccgactggcgccctgacccgtaacttcgacaacatgcgtgaagatgaaggtctggctgaccgcgctaccttcgtcgttgacccgcagggtatcatccaggcgatcgaagttaccgctgaaggtatcggccgtgatgcgtctgacctgctgcgtaaaatcaaagcggcgcagtacgttgcttctcacccaggcgaagtctgcccggcgaaatggaaagaaggcgaagcgacgctggctccttctttagatctggttggtaagatctaagtctgtttgtgcccggcggcgctacgcttgcacgggcctacaagatcgtaggccgggtaaacggcgtgccacccggcaatcaatgggcgctttcgcgcccattttattccaacaccatgatgcaagcgcattcaggcagcctgacgaggccgcttgcatgatgatgttttaagcccaggagataacaatgctcgacaccaacatgaaaacccagctcaaggcctaccttgagaagctgaccaagcctgttgagctgattgccacgctggatgacagcgctaaatcggcagaaatcaaggaactgttggctgaaatcgctgaactgtcagacaaagtcacctttaaagaagacaacacgctcgcggtacgtaagccctcgttcctgattactaacccaggttccgaccaggggccgcgttttgcgggctcgccgctgggccacgagtttacctcgctggtgctggcgctgctgtggaccggcggtcatccgtcgaaagaggcccagtcgctgctggagcagatccgcgatattgatggcgatttcgaattcgaaacctactattcgctctcctgtcataactgcccggacgtggtccaggccctgaacctgatggcggtgctcaacccgcgcatcaaacacacggcgattgacggcgggaccttccagaatgagatcaccgagcgtaacgtcatgggcgtgccagcggtgttcatgaacggtcaggagtttggtcagggacggatgacgctgactgaaatcgtcgccaaagtggataccggtgcggaaaaacgcgcagcggaagagctgaatcagcgtgacgcttacgatgtactgatcgttggctccggcccgtccggcgcggcggcggcggtctactctgcacgtaaagggattcgtaccggcctgatgggcgaacgcttcggcggtcaggtgctggataccgtggatatcgaaaactatatttcggtgccgaaaaccgaaggccagaagctggcaggcgcgctgaaagcgcacgtcaatgactataacgtcgacgtgatcgactcccagagtgcgaccaaactgacgccggcggcgacagagggcggcctgcatcagatcgaaaccgcctccggcgcggtgctcaaggcgcgtagcgtcatcatcgccaccggggcgaaatggcgcaatatgaacgtgccgggcgaagatcagtatcgcaccaagggcgtgacctactgccctcactgcgatggtccgctgtttaagggcaaacgcgtagcggtaatcggcggcgggaactccggcgtggaagccgccattgacctggcgggcgtcgtagagcacgtaaccctgctggagtttgccccagagatgaaagccgaccaggtgttgcaggataaagtccgcagcctgaagaatgtcgacatcattcttaatgcgcagaccacggaagtgaaaggcgatggcagcaaagtcaccggcctgcagtatcgtgaccgggtgagcggcgatgagcatcatatcgcgctggcggggatcttcgtccagattggcctgctgcctaacaccacctggctggaaggcgccgttgagcgcaaccgcatgggtgagatcatcatcgatgcgaagtgcgaaaccaacgtcaaaggcgtgttcgccgcgggcgattgcaccaccgtgccgtacaaacagattattatcgcggcaggggaaggggcaaaagcgtcgctgagcgctttcgactacctgatccgcacgaaaaccgcataacaagtcagacaatagacctgcataacaaagaggctacccaggggtagcctctttttttatactcttttcgtcattcttacctgacgaccattaccgggatatgggcatggcggatcacgctcgaggcattggagccgagcaggtgggtactgatggagggattgcgtgagccaataactaccacgtcggcgttaatttcgctggccagctcgttgaccatatcgcgcacgctgccaaaacggacatgtagcttgatacgagacgggtcaatgctgaagtggctgaccatcgtctgcaggcgagtctccgcctcatgctgcagatgttcctcaaaccgccgcaggtcggcggtaaaacggctcatggtaaagctcgcggaacccggtaagacgtggagcagatggatcaccccgtcctgctgggccagaaactccgcgtgccggacggctttatcgctcagcgccatctcaaagacatcaaccggcataatgatagtcttatacatatgcaatcctccttgttcgtttgcgtctatatcaacatattatatgcggatattgtgtcattcaggtcgcaaaactgtcagccaggcaggcgcaaagcgtaaaaaagggtaagcggcgggaaaacagcagaaagaggatgtgcggacatcctctgaataaagcgcgaaacgcctcaggcagcgggattagcggtggaattcgccagcggcttccggctggtacaatagctccagcacttccaggtgcgtcgatgcgccgcccggcagctcccagtgaatggtgctgccgactttcaggcccagcagcgcggcgcccaccggcgcgaggacggagagctggctggcgctgtcggtcacctgtgacggaaacaccagcgtccgcacgcgctcttcgccgctggttaaatcgcggaattttaccctgctattcatggtgacgacatcatgcggcatcgcttccggggccagcatttgcgcgcggtcgagttcctcattcagggcatcggcaaccggtgagttggcgaaagccggctgctccagcagcctgtcgatacgttcggcatccagttcattaatgatgattgcgggtctggtcattgcatactccatgttatccaggaacctgtccgtaaaagaaaaccctcgccgaaaggggcaagggttaaggtcctaccatcatactgagagttgccggcagtttgaagtgatgaaacgcacattcagcgtgcaacaccatccggcggacggtgttttccaatcagcatcccgctttacgctagtggccaaccttatcgaggataaactgtgcgccgcagttacccgggtgaggctggggcagaaaagcggaagtggccagcggggcgttgatggtcgcggcgttgagcgagatttgcatctccgtcagataggccggattaccgttgcaggttagcttaaacgcctttacgctctgcggaccccaggcgcgggccacggcggcgtcgaagtcggcgcggctgaccgtttggccatagtgcttcgcgagaaaatcccccaccgggctgcgcttaatttcaccgtttagtcgcaccatggcgccaaagtagctgtcgggatcgaagccgaagcagacgccatgtttggcatattcgtagcgttccaggcaggaggtgccgcccgatcccggcatcacattattaagtttattggccatctccagcgacagtccggtctccgccgcctggcatttgcggttcgcttttacctccggcatgttgggcaccggacgcgtggcgcagccgtagcgcatccagcgacgttcatccactccgcgcgcggcaatggactttggcagcccgggccacaggccatgcacggtcagaaagtcggctttattcgcggtgtcctgctgcaggcgacactcttccggttcgttgcgattgcggtcatacatgctctgacagaatccggtttgccaggagagggcaaggacgtagcggtcaaaatcagcgtatcgcatcgcggtgagcggttcagcaccggcctgagtggcggtaagcacaagggcaatcgcggcgaaatccttcctgaacatttttattcctgattatggatggcaaaagataacggggagttattaaagcataaaaaaggcgcccgctggcgccttttcgcgtggttagaccattagtggagcgcgctgccgggcaccaggatttcagtagcaacgatcaccaccagcaggccaacgagcaccggcactgaggtgcgcttgaccacttcgaatggggaaatcttcgccatcccggcaacggcgaccaccaccccggagacgggcgatatcgtgcggccgaggttagaagcctgcagcatcggaatcgacaggtaggccggattgatgccggaggagtgcgccagcttggggatcatctcaacgaaggcgtagaacggggcattaccggaaccggtggtcatcgccgccagcatggtcaggatcaccagcaccagcatcagaataatgctggccgagccgaaggaggtggcgattgagatcagaccgttgataaagccgatagtgcttaacccctgggcaaagacgccggcggcaaccaacagcatcactacgccggcgaaggcgtcggccattccacggtaggcgacttccagcccgctaaagacgtttttggtgttgaaaccgcgcaggaactcgaggatcgccgccagcagcatgcagccaacgaggatggtgataatgtgcagctccggcccccatttaccgtcaaagatcagcacgccgatgatcggggtaaacggcagaatggcatacagcgccggggcggtggtggtgatgtcgttgacatcgagcatctcgtgagaaatgtgctcttttttatccagatagcgctgccagaaaaagtgggcgatcgccatgcagataatagccgcgatggagatcggcagcgtggttttaaaagcaaagtcgatcagcggcatttcagcggctttggccgccaggacgacgtcacccgaggttggcgagaggataatcgccgccggtgaggcgcagatggcggcggcggccccgcggctgataccgacattcaccattaccgggaacagcgtcgccaccagtagtacgccaaggccggtcgcggaggagacggccagcgacatcaggcaggcgacaaaataggcggcaatcatcagcagatagggcgaattaatatagcgcaacggcttcgacgctaatttgaccaccatatcattggcgccaatatgggtcatataggtggcgaagccgcacagcatcatgatcatcatgcccagatcgccgccgcggctcatgagtagaatcttaatgtattcaataatatcggtagcggaatagccggtgctcgcggtattacccggtaacactttatgtcccagcagggcgctgacgatcagtaagattaagcctccgacgaacagcaccccggtggccgagtagcctttaatgatatagcgggctacgcccacaatgaccacgatccctatcaggatctcaataaacgtcagcatttattacccctaaacccaaagaatatgtagctaaaaagcaccacaccaaattttaatgtgcgaatgtgccgaaaaaacggacaaaactcgctgatgcaaatcaataaagcgataagaactacacgtcccccgtcacgcctggatataatcaccagatggatagttaagccgttctgatggacagcgggcgaaaatcaggagtttgccttatttcgttcaacctgtattgagattatctttgctattttaggtggcttttaaatcaaagtggtaatagaaaagtgttgatgttacgtcgtttttcattgttttctcttggttttttaggatggttattggtgtccggaaacgccagcgcgtcgttttcatcgacccttagcgaaggttaccataccttaagtaataacgtagcgcagacctggaatgagccggagcactatgatttgtacgttccagccatcacctggcatgcgcgctttgcctatgacaaggaaaaaaccgataagtataacgaacgtccgtggggggcaggtttcggcgtctcgcgctgggatgagaaagggaactggcatggcctgtacctgatggcgtttaaagactcttttaataagtgggagcccatcggcggctacggctgggagaaaacctggcgcccgctgacggaccagaatttccacctcggccttggctataccctcggcgtcacggcgcgcgataactggaactacatcccgatcccggtgatcttgccattggcgtcaataggttacggtccggcaactttccagatgacctatattcccggcacctacaataacggtaacgtttacttcgcctgggcgcgcatccagttttaattcgctaagtcttagcaataaatgagataagcggaaggtcttgtgcaaaaacaaggactaaagcgttacccactaaaaaagatagcgacttttatcactttttagcaaagttgcactggacaaaaggtaccacaattggtgtactgatacccgacacagcattagtgtcgatttttcatataaaggtaattttgatgtctaagattaaaggtaacgttaagtggtttaatgagtccaaaggattcggtttcattactccggaagatggcagcaaagatgtattcgtacacttctctgcaatccagtccaacggtttcaaaactctggctgaaggtcagcgcgtagagttcgaaatcactaacggtgccaaaggcccttctgctgcaaacgtcatcgctctgtaagcaacgcgtcagtagaatataaaaacccgctaataagcgggtttttttttgcctgtctccttcgcttttagcggctggccgcctgcgagaaaagccagaaggcgaccgccgtcatcgcaaacgaacccagcaaattcaccgcgacgttgagcagcgcccagcttacccggccctgctgcaggagaaacaccacttccgcagaaaaggtggagaacgtggtcaggccgccgcagaaaccggtggtaatcagcagtttccacatcgggtcaatcccggtcagacgattaaaccacgccagcccggcgccaatcacaaaggcgcctaacaggttggccgttagagtcccaatcgggatagcatggtgcacaggattgagcttcatgccgagccaccagcgcaatacgctgccggtgccgccgccaataaaaacggcgcaaagaagttgaaacacggtcgtttcctgctatttgatgtaagagagtgtcaagtgtagcgcgcatcgggcgcgattggctatccataacctgacgggagaagaacatgcgggtagcggcaggacaatttgccgtcacgccagtatggcggacgaatgcgcaaacctgtgtggcgatgatgcagcaggcggagcgagaaggggcggcgctgctggtgctgccggaggcgttgctggcgcgggatgacaacgacccggatctgtcagttaaatcggcccagccgctggatggcgcatttttgcagccgctgttggccgagagcaggcgtaacagcctgaccacggtcctgacgctccatgtgccgtcaggggaggggagagcgaccaacacgttggtggtattgcgggaaggcgcagtgattgcccattatcataaacttcatctatatgacgccttcgcgatgcaggagtcccggcgggtggatcccggtcagcagatcccgccggtgattgaggtggcgggattacgcgttggcctgatgacctgctacgatcttcgctttccggaactggcgctttcgttggccctgaatggggcacagctgctggtgctgcccgctgcatgggtgaaagggccgcagaaagagcatcactgggcgacgctgctggcggcacgcgctctcgatactacctgctatatcgtggcggcaggcgaatgcggaacgcgcaatatcgggctgagccgcatcgtcgatccgctggggaccactctggcgggggccgggagcgagccgcagctgatctttgccgatctctcagcggatgaccttgcgcgcgttcgcgagcgtttgccagtgctgcggaaccgacgatttgcgccaccgcaattattatgacgtttttttaaacaaggcttgattcaccttgttacagattgctattgtgtccgcgcgtcaaatacccgtattgtttatcccaataattcgctgtgcacgtcaggatggacatctcagcgctcactcccggaggggaggctatgggccgaaacacgcagcccacgcacaggtggattacaataggacggataaatgcgtgtatgatggcgtattcgcagcttgtatagagaagaaggttagctatgggtgagattagtattaccaaactgctggtagtcgcagcactgattatcttagtgtttggtaccaagaaattacgtacgctgggcggcgacctggggtcggctatcaagggctttaaaaaagccatgaacgaagatgacgatagcgcgaagaaaaccaccgcagaagaagaagcgccggcgcagaagctctctcataaagagtaattctccggctgcgtcccctgacgggatgctggcggtacggcgaagaggccgcgacgtttatcgttgcggcctttgtcgtttttgtcgacgccgcggagaaaagatgcaactaactgttacggacaggcgaaacggatgaagcggagagagccgctgcgccgaaaaggcgcgcagcggcggaagcggtgggttatttaacttccatccctttagcctgcaggtcggcatgataggaagagcggacgaagggaccgcaggcggcgtgggtgaagcccatcgccatcgcttccgctttcatctcttcaaactcttccgggctgacgtagcgctgcaccggcaggtggtgacggctcggctgcagatactggcctaacgtcagcatggtgacgccatggcgacgcaggtcgcgcattacttcgatgatctcgtcgttggtttcgcccagacctaccatcaggccggatttcgtcgggatctccgggtgcgcttctttaaaacgctccagcagcttcagcgaccagttgtaatccgcgcccggacgtacctgacgataaagacggggcacgttttcgaggttatggttgaagacatccggcggggtcaccgtcagaatatcaagtgcgcgatccatgcggccgcggaaatccggaaccagcgtttcgatcttaatcgacgggtttttctcgcgaatggcgctgatgcagtcggcaaaatgctgtgcgccgccatcacgcaggtcgtcacggtctaccgaggtgactacgacatagcgcagacccatatcggcgatagtttgcgccagcttttgtggctcgtttgcatctggcgcgaccgggcgtccatgcgcgacgtcgcagaacgggcaacggcgggtacagatcgcgccgaggatcataaaggtcgcggtaccgtggttgaagcattctgcaaggttcgggcaggaggcctcttcgcacacagagtgcaggccgttcttacgcatcgctgctttgattccctggatacgggacgagtctgccggaagtttgattttcatccattccggttttctgagcagagcttcacgctcagttgccacgtttttcaccgggataagggccattttatcggcgtcgcggtacttaacaccgcgttccatcacaatgggtttactcatagcgtgcgtgttccagttgcgagtcacgaaggaaagcgaattaattcaatgaaatgttgcaattatcaactatttttgaatcaagagcaggcagtataccattgaaaaggggcagaaagcagcctgcctgcccggcaaattgtaaaatagttgttgttttatccttttcccttccgtgcgctacgccttaaacgagcggatcaccgtctcgatgatctctttcagcaatggctctttcccgctcagcttattaaagtgcagcgcaacgtcaatctgctcttcaccgagggaagggaaatccagggtctgcagcggccagagacgggacaccatggcgaacaggcgttcggtggtcagacccagcatatcgctcccggcgatcatcgccgcctgggtcatcaggttaaaggtgctaaagccgcagcggcgctcgcccatctcttcctgtagtcggcgatggagggtggggtagcgctggccttccggcagcagcagcgcaaattcgtactccgcgagggtcgtttcatcctgcggaccgtccagcgcgggatgccctgcgcggcagtacatctgtacccgatcctgatacagcacatgatggcttatcgcctggccgctgtgcaggtgggtatcaatgagcagatccacctggcgctggtcaagctgccgcgcggcgtcgacgatggcgatattgtgcaacaggatctgcggaaaggtcggcttcagcgcgctggccaggccaggcatcagcagcgctcccatcgctggcgtagtggcgatagtgatcacccgctgctggtgcgggctaccggtgatatccagcgcgctgaggaaagcttccatgccgcggctgatgtattgatgaagatgggtggcataggcggtgggggtaacgccctgtcctttgcggataaatagcggatcggggaacagcgcccgcagtttgttaattgactggctaatcgccgacggtgtgatattgagtattttcgcggcgttgacgatacctttatgcacgtataccgcttcaaagatggtcaacagattgaggtcaatattacgcaggatgcgaaacatttgacgatcgtaacgttcatcctgtctgtcaggagattctgacggaggcgtattctctggcacgcgatgagtccggttgggaatgataggccaagtatagcggcccaccgcgttgccgtgcgtgacaattgattgcaaaaataacgtgttactcgtttagcgccccgctgacagcgggacgttggcctgccgcttaatcccggggaagatattcgtgcggtggatgatttagcagcgccagcagattggcgaccagccgcggagcgaccgtctccggggaggctgccggctgccactggcgcatttgcgtcatctccataccggcatagccgcaggggttgatacgcagaaacggtgtgagatccatggcgatattaagcgccagaccgtggaaagaacaacctttacggatccgcaatcccagagagcagattttgcgttcgccgacatagacgccaggggcatcggcgcgggggtgcgactcgatactatattcagccagggtattgacgaccgtttgctccagtagcgtcaccagctcccgcacgcccagcttacggcgcttgaggtccaacaggacgtacatcacctgctgtcccggaccgtgataggtgacctggccgccgcgatcgctctggatcaccggaatatcgccgggcaccagcacgtgttccgctttgccggcctgaccctgggtgaatacggggtgatgttccaccagccagatctcgtcgagggtatcttcatcacgggcgtcggtaaattcatgcatcgcctgcgagacgggttcgtaaggttgcaggccaagctgccggataagaattttattgtgctgcaaaacaacatctccgccgggaagagagaattcaggttggggagtatatcacagccgtgcagaagggaatgagaagacccggcacggcggccgggtcagggaaaaggttacagcaccatccgaacgatatcgatattgcctaactcttcgtacagcgtttccacttgttcaatgtgggtggcgttgatggtgatggagaccgagtggtagttacctttgctgctcggttttactgacggcgagtaatcaccaggcgcatggcgctgtaccacttccaccacctgatcaaccagctccggcaacgcctgccccattactttgtaagtaaatggcgtagggaattcaagcagttcgttaagtttggttttcatgtcagctccggtgttacgacaaaataataactcccaccaagggcgggagttatcaggttacttggatgaatagtatatggggatggaaatcacactttcaagtgttcgatttttaaccaaaccagtggtggaacattaatttaatgtaatcaataattttgccgaagaaattaccttccggaatttcctgcaggaccaccagcggacgctggtcaatggttttaccatccaactggaagttaatggtgccgacaacctggtttttctgcagcggggcgtgcagctcagtgttattcagcacgtagctggctttcagatctttcattcggccgcgcggaatggtcaggtagacgtctttatccacccccagcgaagcgcgatcgctgtcgccgaaccaggccggttcggaggcaaactctttgccagctttaatcgggttgacggtttcgaagaagcggaagccccaggtaagcagttttttgctttctgactcacggcctttgaacgtccggccgcccattaccgcggagatcaggcgcatctggccttcggtggcggaagcgacgaggttgtaacccgctttgtcggtatggccggttttgatgccgtcgacgttcaggctgttatcccacagcaggccgttacggttcagctggcggatgccgttgaaggtgaactctttctcacgatagatggagtactcgttcggtacgtcgcggatcagcgcctggccaatcagcgccatgtcgcgcgcggagctgtactgtccgtcagcatcaagaccgtgaacggtctggaaatgggtgtttttcaggcccagagcgttgacgtagttgttcatcaggctgacgaaggcgtcctggctgccggcgacgtagtcggccatcgccacgcaggcatcgttaccggactgcaggttaataccacggatcagctgagaaaccggcacctgcatgcccggcttgaggaacatcagagaagagcctttgaaaaccgggttgccggtggcccaggcatcgttgccgacggtgaccagatcggactctttgaatttgcccgctttcatcgcctgaccgataacatagctggtcatcattttggtcagactggccgggtcgcggcgggagtcggcattgttttcagccagtaccttgccagagttgtaatcgataaggatccaggattcggcgtcaatctgcggggcgcctgggatcatcgttttgatattcaggtcatcggcgcgggcagcggaggagagcgctgcaacggagagcgccgtaatgagtaaacgagcggtgaaagaggtcttcatggtcagaacaacggcatccgtgatggagttaaaaaagtgccttactatagcaaatgctctgcgggccagcatccgacattgcgcatgagtttgttaatgacttttacatgcgcgaggtgaacgggcggcccgcggcgtttagttggcgcgagtaataaaggactgcagctgcgcttcgctttgcaggcgctgctgcacggcgctggcctgtgctttatcagcaaagggacccagctgaatacgccagaccgcgccgttttgcatgacccggcctggcacagaaaactgctggctcaggcgctgctgatactgctgcgcccgcgtctggtcgcttactgcgcccacctggacaacaaaattaccgctggcgctggaggtcgccgaggacgaggccgccacggcgccagcggctgcggcggtggccgcagcgggcgccacattaccctgaatggagccaggcgcggtcactggcgctgttggcgtggcgccggcggcaggagccgtcgcggcggctgccgctggttcgctactctccagcacgccgttgttcaggggcgtcggcgcgccgaggaaaccgccgctgttcaccggcgcgcccacgctgtctgccggcgtcagcgtgctgttgctgatcgggcgaacgtcagtgggtgcgggttggctcatgccagcggcgtccccaccgtccagattcggacgggcgggcagggcgtaagtctgtttggcgacggtggtacaggccatccccgggccggaaagcgaaccgtcaggcgcgacgatgatggggtcgatgcgcactttggtgttgttagaggtgttcaggcggtcagcggatgcgcgggaaagcgagatgacccgatcgttgccatagggaccgcgatcgttaatccgcacgacgatcatccgtccgttggcaaggttagtgatccgcgcgtagctcgggatcggcagcgtcgggtgcgctgcggtcaactgagtcggatcgaaggcttcgccgctggcggtcaggttgctgttgggttcagcgtcatagatcgccgcgaaaccggcctgagtaaagttggccggatcctgaacgattttgtagcttttaccgtcgcgctcataatcctgattcgccgtggcgttcggcgtttcatattgcggatcggcgccgctgatctcaaccgtcgggccattacagacggccggctgtggagtactgaccgttttttgttgcacgtcatcactcgaacatgccgccagcagccccgctgctatgcagatccccagccattgcttacgcattgctaacccctttaaacgcttttcgacaacatttttctgtgggtatggatcgacattacgataccaaacccggccatcagtacgatcagggcggagcccccgtagctcaccagcggcaacggtacgcccaccaccggtaaaataccactcaccataccaatatttacgaagacataaacgaataaaatcaacattaaaccaccggccatgacccggccaaaggtggtttgcgcctgggcggcgatccacagtccgcgcataatcagcagaatataaagcgctagcaggatcagtacgccaatcaggcccagctcttcggcgaggacggcgaagataaagtcggtgtggcgttccggcagaaactccagttgcgactgggtgccgtgcagccagcctttgccgcgcagaccgccggagccaatggcaattttagactgaataatgtgatagccggcgcccagcgggtcagtttccggatcgaggagcatcatcacgcgctgacgctgatagtcgtgcatcaggaagaaccacaggatcggaataaaggcggcgaccagcaccacggcgataccaatcaggcgccagctgaggccggataggaacagcacaaacagcccggatagggcgatcaggatcgaggtcccgaggtcaggctgcgccgccaccagcagcgtcggcaggaagattagcaccagggcaatgccggtgttcttcagcgacggtggacagacatcgcggttaataaaccgcgccaccatcagcggcacggctattttggcgatctccgacggctgaaagcgcacaataccgagatccagccagcgctgcgcccctttggagatggcaccgaaggcgtcaacggctaccagcaggatgatacagaaaatatagaggtagggcgcccagccttcatagacccgcggcgggatctgcgccatgacgatcatgatcaccacgcccatggcgatctggccgattttacgctccatcatgccgacatcctgaccgctggcgctccagataaccagcgcgctgtaggtcagcagcgccagcaggataagcagcatggtggggtcaagatggattttatcccatagcgattttttgttcggattatccgtcattattgatcctcccctgcggttaccgccgggttttcgcttggcagcgtagtgttgttatcgcccagcatgatgtgatcgaggatctggcgcataatcgtaccgaccgccgggccggcgccgccgttttccagaatcatcgccacggcaacctgcgggttgttataaggcgcaaacgccgtcatcagtttatggtcgcgcaagcgctcggagatccggtgcgcgttataggtttcgttggccttcaggccgaacacctgagcggtacctgacttggccgcgattttatacggcgcgctggcgaagtatttgtgcgcggtgccgttgccgcggttggccacgccgtacatgccgtctttggcgatttcccaatagccggaatggatatcgcctaccggcggctcatggggctggacccagggtacgggcttgccgtcttccacggtgctctgcagcagatgaggcaccttcaccacgccgtcgttaatcaggatcatcagcgctttgttcatctggatcggcgtggcggtccagtaaccctggccgatgcccaccggaatggtgtccccctggtaccagggtttcttaaagcgcttgagcttccattcgcgggtcggcatgttgccagagcgctcctcggagaggtcgataccggtgtagtggccgtagccaaacttgctcatccactctgagagacggtcgatgcccatgtcataggcgacctggtagaaataggtatctgcagactcctcgagcgctttggtgacgttcagatggccgtggccccactttttccagtcacgatagcgtttctctgagccaggcaactgccaccagccggggtcgaagaggctggtgttgcgggtgatcaccccggcgctcagcgccgagacggcgacgtacggtttgaccgtcgacgccggcggatagaccccctgcgttgctcggttgaccagcggtgtgttcgggtcgttgagcagcgcggagtaatctttgctggagatgccgtcgacgaacaggttcgggtcatagctcggggttgaaaccagcgccagaatagcgccggtacgcgggtcggtcaccaccacggcggcgcggctgccggccagcagcgtttcaatatactgctgcagcttgaggtcgagggtgaggtagatgtcgcgtccggcctgcggaggcacctctttcagctgacgaatgacgcggccgcggttgttcacttcaacctcttcgtagccggtctgaccgtgcagaacgtcctcgtaataacgctctatacccagcttcccaatgtcgtgcgtcgaggcgtagttggccagcttgccctctttatccaggcggtcgacgtctttatcgttaatttttgagacatagccaatgacgtgagtcagcgccgaattataggggtaataacgacgcttgtagcctttgacttccacgccgggaaagcggtactggttgacggcaaagcgggccacctgcacttcgctgaggttgacctttaccggaatcgaggtaaaacgatgggagcgggcgcgctcctttttgaaaccggcgatgtcatcgtcggttaaatcgacgacgtcgcgtagcgcatccagcgtctgctgtacgttatcgactttctccggcatcatctccagctggtaaatggtgcggttaagcgccagcggggtgccgttgcgatcgtaaataatgccgcggctcggcgggatcggcaccagcttgatgcggttttcgttcgagcgcgtctgatagtcgtcgaagcgaacgatttgcacattgtacaggttggcgatcagaacgccggtaagcagcaaaatccccaaaaaagcgaccagcgcccggcgcacgaacagcgaggattcagccgtatagtcgcggaaagaattctgtaatttcattcgctgcttagtctaccctgatcatcattactcacggtggtacgggtggttggtggtgatgctccacgcccggtacagactctcggccaccagtacgcgcaccagcgggtgaggtaaggtgagggtggagagcgaccaactctgttccgccgctgctttacaggcgggagagagaccttccggaccgcctaccagtaaactgacgtcgcgcccgtcctgtttccagcgttccagttcgcgcgccagctgcggtgtatcccatggtttacccggaatatccagggtcacgatgcggttcttaccggcagcggctaacatcatctcgccctctttttcgaggatgcgtttgatatcagcgttcttaccgcgcttaccggcagggatctccaccagctcgaacggcatatctttgggaaaacggcgcagatactcgctaaagccggtctgtacccagtccggcattttggtgccaacggccaccagctgcaacttcacgcattaactccagagtttttccagctcgtacagacgacggctctcttcctgcatgacgtggaccatcacgtcgccgaggtcgacgacgatccagtcggcggcggcttccccttcaacgcccagcggcagcatgccggcggcgcgggactcctgaaccacgtggtcggcgatagacatcacatgacgcgtggaggtgccggtgcagataatcatgcaatcggtgatgctggatttgccatgtacatcaatggcaacgatgtcctgacctttcaggtcatcaattttgtcgataacaaaatcctggagtgctttaccctgcaagtgttccccctgggtgcgtgaagattgataatcataaagagcctgacagtatacctgaactgatgaaaaagtcgggtgaaatgtctgtcggcaggcgttcgtggcgggctatcatcccatccctcgccgcggattgcatcgccatttttgtaaaacaatttctgcaaaccggctttggcggatgctgcctggcagcggagaataacagcctgctctggcctgtcaatggtctggcgggaattcttcttgcggccgccagacggcctggctatttaatacccgcagggtggtgaaatcgtcgcggatttcgaggaggctccaggcgccatgggcaatgggaaagtgccacatcgccgccgcaggcatctgcaacagcagggcggtcagcaggctcaggacgccctgatggccgacgatcagcagatggtcaagatggcggcagtcggtcagcgttgggataaactcgctgacgcggcgggcaaaattctgaaagctttcgccgttggtgggggccgcatgctgccagtcggcacaccaggcggcatagttttccgcatcttctcgctggaggtcgcgatgatgacgcatctcccagtcgccgaaaaacatctcattgagcgcgggatggcgctcacgcggaatagcgcggtcgccaagcagcagatcggccgttgtcccggtccgcgccagctcgctacagaatactttatcgaaaggcgccaggcgcagccgttcgccgagcgcgcgcgcctgagcgacgccgcgcggcgtcaggggcgttggggcatggccgctgtataacccggcaacgttggcttcggtttcgccatggcgaactaaccacaatttcatgaacaggctctgacaggcgatgaagagatggcgttacgatagcgcttttttcgcgccaggcccagcctggggtcagcaatagagtccctgctcgcggatgtaatccagcacggcggcgggcagcatctcggcgcaggactcgccgcgctcaaggcgctggcggatgatcgtcgcggaaatatcgaaccacggcgtctcagccaggtagatcacgccggaagggcggttatgcagagactccacgtcgtgggttaaatggcgatccagccagcgctgatccgcttcctgcgccatggtcagcgggtaacccgggcggcggcaaacaatcaggtggacattgtcgagaatggtttcatagttgtgccaggtgggaaaggtcagtagcgaatcctggccaatgataaacgccagcggtttgcgcggcccctgctcctggcgccactcctgcagcgtttgcgccgtccaggagggggtatcgcgccgtagttcgcgttcatcgagcgtgaacagcggtttatcggcaatcgccagcttcagcatgtgcacgcgctgggcgctggtggcttccggctgcggccggtgcggcgggacgttgttaggcatgatgatgaccttgctcaggccaatctgattcgccaggatctcaaccggcttgaggtgaccgtaatgcaccggatcgaaggtgccgccatagattgcctgtaactgagtcatatcaaccatcaataaaaacgtccgccagggctttgtggcagagcaacaacgaaagactttccagttcgggccagacgtcgtgcccgtaatcctgtttaaaggtgagctccgcgcgggtcagaagggtcaccgcctggcgcagctgttccccgctcaggcgcgtgagggcgtcgctgagcagctgacggcggttttgccagacccgatgtttatcaaacagcgagcgcagcggcgtgtgcgtcgcctggcgcttgagggtaaccagcagcagcagctcccgctgcagagtacgcagcaggatcgccggctcgcagccttcaaggcgtaactgctgcaggacgtgcagcacgcgcttacttttgcctgccagtagggcatcgacccaatggtaaggcgtaaagtgcgcggcatcgtttaccgcttgctcaacgcgggggagggttagcttaccgtccggccagagcagcgccagacgctccagcgcctgcgccagcgccagcagattgccttcgtaacagtagcacagcagctgactggccgcgtcgtcgagctgcagctgatgctgtttggcccgggcggccagccagcgcggcagctgcgcgtattccggcgtctggcaactgacctggacggcgcgctgagccagggcggtgagccatgcggcattctcctgggctttggtcagcttatttccgcgaactatcagcagcaggtcgtcgtgcagcaggccaaccagcgtggcgagctgttcattgatcgccgcgttggggccgttttccggtaggatcaacagcagggtttgccggctggcaaacaggctcatcgcctggcttaaggcgaaaatcgcctgccagtcggtgctgttgtcgattgaaaaagtatggtgctcggtaaagccctgcgcggcagcagcttcgcgaatggcgtcctggctttcctgcaacagcaggggatcgttgccaagcagcagataggccgcgcgcagcccttcagtgagctgcgcgcggagctgttccgggtacaaccgaatcatcattgacccagcgtggtggagacgcggttacccgaggaagccggcgccgcgctgctggcgaccggtttctcttcctgctgggttgcttcaacatccgctacctgaacgcttggcagcttacgaatcagctgttccgccgctttgtcgtacatttcctggataatcatatcctgctcggcgtctttcgctaatgccgcctgcgggttatcaaagaacgaccgatagaccttggtggtaatcggatagatatcgtgacccgggatcaggacgctggcatgaacggtcatgaccatctgatactccgccgtacgaccatcctggaacaccgatgcggtatctttctgaatcgacgagccatcgaggcgcagagaagggacatctttacgcagcgtgctggcgtcgatcagttccacgccgttaagacgcagctgattacgtaccgcgcggcttaacgggccgttcggatcgctcgactggaaaatcatggttttcatggtggcgggcaccttggtagtgctacgcaaatgccagccacagccggcggtgacgagcaccgccagagataacaacattgttaccagatatcgcacgcttcctcccgcgcttagccaacgaccagattgagcagtttaccgggaacgtaaatcactttacgcacggttttaccgtcgagatatttcgccaccagatgttcctggccggcgcgctcgcgaacctgctcttcagttgcatctaccgcaacggtaattttaccacgaactttgccattgacctggacgacgacgagggtgctgtcttccaccatcgcgctctcatccgctaccggccacggcgcgttgtcgatatcgccttcgccgttcagctcacgccacagggtgaagctggcgtgcggcgtgaacgggttgagcatacgcaccaccgccagcagagcttcctgcatcagcgcacgatcctgctcatcttcctgcggcgctttcgccagcttgttcatcagctccatgattgccgcgatggcggtgttgaaggtctgacgacggccgatgtcatcggtcactttggcgatggttttgtggatatcgcgacgcagcgctttctgatcttcgctcagagccgccacgttcagtgccgcaacctctcctttagtggtgtgctcgtagaccagtttccagacgcgtttcaggaagcggttcgccccttcaacgccagattcctgccactcgagggtcatatccgccggggacgcaaacatcatgaacagacgcacggtatccgcgccgtagcgctcaaccatcacctgcgggtcgatgccgttgtttttcgacttggacatcttgctcatgccggtgtacaccagctcgtggcccgccgcgtctttggccttcacgatgcggcctttttcgtcgcgctcaacgatggcgtcaaccggggaaacccagttacgttcgccgttttcgcccacatagtagaacgcgtcagccagcaccatgccctggcacagcagctgtttcgccggctcatcggagttcaccatgcccgcgtcgcgcatcagcttatggaagaagcggaagtagagcaggtgcatgatggcgtgttcgataccgccgatgtagatatctaccggcagccagtagttggccgctttcgaatccagcattccttcctgatactgcgggcaggtgtagcgcgcatagtaccaggaggattccataaaggtgtcaaaggtgtcggtttcgcgcagcgccggctggccgttgacggtggtcttggcccattcaggatcggctttgatcgggctggtgatgccgtccatgaccacgtcttccggcaggatcaccggcagctgatcttccggggtcggcagcacggtgccatcttccagggtcaccatcgggatcggcgcgccccagtagcgctgacgggatacgccccagtcgcgcagacggtagttaactttacgctcgcccacgcccatggcagccagtttgtcggcaatggcgttgaagcccgcttcataatcaagaccgctgaactcgccggagttaaacaggacgcctttctcggtcagcgcctgctcggagagatccggctcggagccgtcggcagcgaggataaccggcttaatgttcagaccgtacttgctggcgaactcgtagtcgcgctggtcgtgacccggaacggccattaccgcgccggtgccgtattccatcagcacaaagtttgccgcccagaccggaatttgttcaccggtcagcggatgaatggctttaaagccggtatcgacgccttttttctccatcgtcgccatgtcggcttcggccactttggtattgcggcactcgtcgataaaggcggccagcgccggattgttcgccgcagcctgctgcgccagcgggtgacccgccgcgacggccaggtaggtacaacccataaaggtgtccggacgggtggtgtagacagtcagtttgtcagcgtagtcgttgacgtcaaaggagatttctacccctaccgaacggccgatccagttgcgctgcatggtcttcacggtgtccggccagtggtccagcttatccagatcgttcagcagttcatcggcgtaggcggtgattttaataaaccactgcgggatctctttacgctcgaccttggtatcgcagcgccagcagcagccgtcgataacctgttcgttggcaagcacggtctggtcattcgggcaccagttcactgcggaggtttttttgtacaccaggccttttttgtacagctcggtgaagaacttctgctcccagcggtagtattccggggtgcaggtcgccagctcgcggctccagtcatagccgaagcccagcatttttagctggtttttcatgtaggcgatgttgtcgtaggtccacggcgctggcgcggtgttgtttttcaccgccgccccttctgccggcagaccgaacgcatcccagccgatcggctgcaggacgtttttgcccagcatgcgctggtagcgggcaatcacgtcgccgatggtgtagttacgcacgtgacccatgtgtagtcgaccagaaggataaggaagcatcgacaggcagtaatacttctctttgctctcgtcttcagttacttcaaatgtacgattttcgtcccagtgaagctggactttcgattctatctcttccgggcggtattgctcttgcatggcagccagtggtcctgttttcaatacagctacaaagtgtagccaatggatgtgttatttcagatcggcatagcatagcccaaacgcccacgtcaaaacagcttttcgcacatcaacatcggcaaaagctgcgcagattatttcgcgactctgtggcttgtcagacacagcgggagaggaataaggtctattatcagaagacgttaaccccaccggaggcgaaatgatgaacaaggttgctcaatattaccgtgaactggtctcctcgctcagcgaacggctccgccatggagagcgcgatatcgacgcgctggtgacgcaggcgcgggaaaaaatcgtccgcgccggcgatctgacgcagagcgagatcgagtcggtgattgcggcggtcaagcgcgacctagaggagtttgcccgcagctacgaagagagtcacgaagacgagagcgacagcgtgtttatgcgggtgatcaaagagagcctgtggcaggagctggctgatatcaccgacaaaacccagctcgagtggcgggaagtctttcaggatctgaatcaccacggcgtgtaccacagcggcgaagtggtcggtctgggcaacctggtctgcgagaagtgccactatcacctggcggtatacaccccggacgtgctgccgcgctgtccaaaatgtggccacgatcagttccagcgtcggcccttcgagccctaagcgtgcgaaaaacgatgcgcgaggcttcgcgcatcgtggtttgtcttatttcaccgtgttgacttcggtgctcttgaaatactgttttccacccatgtcgctaacatatttctgcgatgagttcagtaccagcttgtcagcagttaacgtcccgactccgcatttcgccaggcccagtatgccgcaacttttaccaccattgaccactttggtggcggttaacgtcatgttgccgcccgcgctgagggttgaataattgtagatcgcgcctttatttttggtatttaaggtcaggtcgccggtgctgctgatctgcccttcgttggtgatatctgagtaggtcgtgattgaaatatttttggcagtaatattgccataattattcactacgccgtgatcggtggtgatatcggcggcattcatataaccattttggttcagccagtagctgtgggcggtaatggcgttggttgcctcaatacgaccactgctgctttgcgccagcgtgccattggtctgcagattgatattttcgccggtgatattgccgaggttatagatctcgcccgtattggcgctgccgtcctgtgtaagcgactgaatggtggtttggccagtagagttaatattgccggtgtttttaaagctgtcgccgacaaacgtcaggctggtgtgtttggcgctgattttgccttcattgaggaaatcaccgattgccgtggcggcaatctggttatttgacagcagggaggctttttcttcgttgcggattttcccgccgctggtcaggcttaatccactggtgccggtcatcgtgcctgagtcgccgttggtgatgttgccgttagcggtggcaatcagctggccgccggagagagaaccggtgttaacgatataatcgccactggagagcattaaataataggcgccggcgatgctaccgtcattggtgatgcccgtgacggtggaaacctggctcagcaaacctttgcccgttattgaccctttgttcagcaaattaccgttgctggtgagcatcagcgtgccgttggagataatagaacccttattacgtacgccaaagccgatattattgccgaccatgctgatgctgttggcctcaatgccgccaaggctgctgacgtcgatgctgtactgcgggttaaccgtcatctggatcagggtggcctttttaccggcggaggtcaccgagccagagctgttatccatggtgaagttgcccgcgctgaccagggcgttgttggcctgcactttaccgttaatcttaatcgcgtcggcgagcagaaccgcgtagccgttggcggcgttcatgccattttcgccgatggtgagggtgccgcccgttacggtatagctgccgatggcgccatcgtcggtcatattaaccttgccggtggtcaggatagccttgttggtattaacaaagctacagccggaacaggtgatgccgttcgggttggcgattaccacatccgctttctgaccgttgacttcgataaagcccttcaggctactggcgtttttggaggtcacctcgttcaaaatcaccgaagcgctgccggcggtcagattattgttgcgggcgatattgccaaatgtgctgtggctgacatcatcgccgctgttattaaggatggtgccattggtgccgacgttgaagtcgcggtacaggttatgggagacaccggcggcattcggcttttcaatatcgataaccgtggcgccggaagagtgcgtatagcttgtggggtcggcataaactaccgacgaggttaatactgccgccagtgcgacataagaagccttaaacttaaacattttctttattcctttaaataatgattaataaataatgtaaatatgacgagtcaataatgtgcgaattaatacctccactgtaatgaaaagcccatattcagggcgtcgctatgaaacttatccggtttactcagcggggtactaataaacagatcgtactgcgttgaccatagctgaccgcgcagcccgctgacggcgccggagagcactttgcctttttgatatagatcggcgccgataagacggcctatatccgcgcccaaatagaattgccgctcgtgggtggccagatcccagataaaatcgttgcgccagtaccatccctgattgccggacaggctgttttcaccgtcaaaaccgcgcacgctccagcgactaccaatattgaatttattatcggaagcgagtttgtccgggctgaactgggcgctgaggcggggagcccaggtaaatttgtcgccggtggcgtcaaatttcatcattgcctgcagattaccatgcacaatccgcgacagcgggctatacagcccggcctgctcttccggcgttgctgtcgagctgagccacggcaggctgcgctggatgccgatgctggcatcaacaatcttgttgttaaagtagtgctggtggttgagggtgaattcccatgaggggttctgcttgcgcatcaccagtagctcactgccgccgaagtaataatgcgaggtgctcttggcgatccgcaggtcggcggtggttttttgctgccgggtgtgggagagcagacgactcagcgtggcgctgtagtagcgatttttactcttataatccatcgtcgaccagttgccgttaaactgctgacgatactggctgtatgccccgtaggcgcttagtgtccagtagccaaagggaatggagtaatacaggctgccgttgtggttgccgtcgttatgctgattgaattcaatatcgcccccgccggaaaggtacaggatatcgttgagggtggtcaggtcatagagatagagggccccgccggcctggtagcgtccgctggctttgctgccggcgtcgtcaagccaggcgccaagctgccattttttcgccaggctgcgggcgatctggatatcgctttctccctcgtgttggcccggcaacagtttcatgtgcgcggtggcgccgggcagacgctgcaggttggccatcccttgctcaaggtcgcttaagcgcaggatagtaccggaagaggtgggtagggaattccacaggcgggtggtgtccgagccgtcggcatagtcgatagcgcccactttgccatagtgcagcgtgaacctgagtatgccgtgctccagcgactgggagggcacatcaatcagcgaggtgatgtagccttgcgcgatcagctcattttgcaaggtataggccagcaggcgaatgccttcgctacccagacagcgtccctgcgcctgccgtgcggttttcgccagtaatttccgggtgagcgcctggttatcggagtcgatatcgacccggttgatcaatttgcaatgcgtttcctcaggaaaagggatcccctgcggcgccacgcgctgttgtgaagactgaaaatcctgttgctgcggcgccagcgcctcctggcgggctttatcctgctccgtctggtgagtagaagaggccaatggcgcggccccggcggctgaggtgcccgccagcgtgataaacagcagcccggtgagcgtgcgagatcgaattaacatgaagcaatatccatttgtttcattggtttggtggcgcatccattattctgcgagcggcagagaatattgatggcctttatttcggcgcaggcgaggtcaggcaagaatattatattcaattaataaaataatcatgcgacgaacctgttacgaggcgttatatgctagcggcggtggcaatgccggtccacgaattcattattgaattctttatgaattgatcgatttaataaataagttcagcttttatcgcccaggtttattgggtacgtaaatgatagtagcgatcatctaccgcataaataacattggcgaataatatggcggaaaagattaactgcgcataccgggcggtatgcgcagagaaaaaccattaatgaagtattttggcgaggaaatctttggcacgctcggattgcggattggcaaagaaggcctctttatcggcatcctcgacaatcttcccttcatccataaagatcacccggttcgccaccttgcgggcaaagcccatctcatgggtcacgaccatcatggtcatcccctcgttggccagttcgaccataacgtccagcacctcgttaatcatctccgggtcaagcgctgaggtgggctcatcaaacagcatggcgatcgggtccatacacagggctcgggcaatggccacgcgctgctgctggccgccggagagttgcgccgggtatttttccgcatgcgccgccaggccaacgcgctccagcaacttgaggcctttcttgcgcgctgaggctttatcgcggttaagcactttgacctgcgccagcgtcaggttgtcgataatcgacagatgcgggaacagttcaaaatgctgaaacaccatgccgacgtgcgagcgcagtttagccaggttggtctttttatcgttaaccacggtgccatcgacaataatctgcccctgctgtaccggctcaaggccgttcacagtcttaatcagcgtggatttaccggagcctgacggcccgcagaccaccacgacttcgccttttttcacttccgtggagcaatcggtcagcacctgaaagtgaccataccattttgaaacgtttttcagggtaatcattacacagtccttttcttcaaccagctgaccaacagcgaggcgctgaggctaatcacaaaatagacgccgcctgcgaacaggatcatttcgacctgggttccgtcacgctcgccaatggtggaggcggtacggaagaagtcggcgagactcaatacatacaccagcgaggtatcctggaacaggacgatcccctgggttagcagcagcggcaccatggcgcggaaggcctgcggcaggatcaccagccgcattgactgccagtgggtcatccccaacgccagcgcggcgctggactggccgcgggagatgctctgaatgccggcgcggataatctctgaatagtaggcggcttcgaacatcgaaaacgccaccatcgccgagatcaggcgaatatccgttttcggcgacagtcccagcacgttctgcaggaagcccgggacaatcaggtagaaccacagcaggaccatcaccagtgggattgagcggaatacgttgacgtaggatttagcaaaccaggccagcggcagaaagctggacaggcgcataaccgccagcagagtgccccagacaatgccgaccacgatggcgatcaccgtaatcttcagggtgatcaccagccctgccagcagatagggcatggagggaacgatcgaactccagtcaaaatcgtacattatttgcctcccatattgccaggcaggcgaaccttacgctcgaccacatacataatcagcataatcaccgcgttgatgaaaacataggccagggtgatggcggtaaaagactcccaggcatgagcggagtagtccagcagtttgcccgcctgtgcggccatatcggccagaccgatggtggaggcgatggccgagtttttcaccaggttcatcatctccgaggtcatcggcggcacaataacgcggtaggcgttcggcagcagcacgtagcggtaggtttgcggcagggtcaggcccatcgccaggccggcgttcttctgcccgcgcggcagcgactggatggcggcgcgtacctgctcgcagacgcgagcggcggtaaacagccccaggcacagcatggaggagacaaagaattgaatgtttgggtccagctccgatttaaaccacatgccgatattttccggcaggaactccggcaccaccaggtaccaggtaaagaactgcacgatcagcggcacgttgcgaaacagttcgacatagcaggtgccaatgcccgagaggaagcgattggggaccgtgcgtaaaatgccgaacagtgagccgacgagaaaagcgatgatccaggccgagatggagagggcgacggtaatttgaaaaccgctccacagccagcccaggtaggtagtgttgccgaagggggcctgttgcaggaatatcccccagttccagtctattgacatacatgactcctggaaaaaaaagggtagccattgctaccctcgaagacggttgtccagcttgtttcggtattcgcggcggctggggaacgaccagccgccgtatagtctgtccgtgctgtgacaatcatcgggagggcaggatatcccgcccctggttgttataattagttcagtgctttgtcgttaggtgatttgaacagcgctttcatgtcgtccgacagctcgaagttgaggttaagattttttggcggaatcgggtttttgaaccatttgtcaaaccacttctccgcttcgccagaggtctgagcctgggcgacggtttcatcaaccagcgccttgaacgtcggatcatccttccgcagcatgcagccataggcttccttcgactgcggggtgccgacgatttcccaattatccggtttcttcgccttggcgcgttcgccagccagcagggcatcatccatcataaaggccacggcgcgtccgctctccagggtgcggaaagagtcgccatgatctttggcgctgataatgcgcatattcatttttttctcatcgttcagcttatgcagcaggatctccgaggtggttccggaggtgacgacgaccgctttatccttcaggtccgggaaatctttgatcggaccgcctttcttcaccagcagacgggtaccgaccacgaagatggtatcggagaaggccgcctgtttctggcgctcaaggttgttggtggttgagccgcactcgaaatcaaaggtgccattctgcagcaacgggatacggttctgcgaggtgaccgggatcagtttgacctgcagatcgggtttgttcagttttttcttgatggcatcgacgatggcgttggaataatcctgagagtagcccacaaccttctgctggttatcgtagtaagagaacgggaccgaagattcacgatggccgacaacgataaccccgtttttggcgatcttatccagggtgttctggccagccgccggggcagcatcttccgcctgcgccagaccagcggtcattcccattaccagcattgccgtggccagtttacgtaattgcatatccaactccttatccgcagcgtcagcgacgctattgatacccattgtgattgtgtgtgttgttattgggggcacgcgtccacgtgccgcatttgtatgtgtttgttagcatttagtttggcttaatgtaaagattttgctgctttattgtttatttttgcgaagcgctccgcaccaatcggaggcaaatatcttccattgcaccaaaatagcgcgaccaccgatcgtttctggtgcaacctggttgcactgggtcggacgatgccgctaccaggttaaataaagcaatgactgtgccagagtggcagatgatgggaagaaaaagccggcgacgggcgtcgccggcggagaaacttatcggcgacgctggcgcaggctcatcagcagcgcggcgaaaccaaacagcgccgtcagcgcccatagcggccagttgccggtgcgggcgtaaggggttaagccgctggcgggggtcacggtggtggtcaacacctcgcgggtaaactgcgggatcatcttctggatctcgccgcgcgggccgatcaccgcagtaatgccgttgttggtgctgcgcagcagcgggcgggccagctccagggcgcgcattcgcgccatctggaagtgttgccacgggccgatggacttgccgaaccaggcgtcgttggagatggtcagcaggaagtcggtgtccggccggaagttatcccgcacctgttcaccgaggattatctcgtagcagatggccgcggtcagcttcaggttatgcgccatcagctgcggctgcacgtaggggccgcggctgaaggaggacatcggcaggtcaaagaacggcgccagcggacgcagaatcgactccagcggtacaaactcgccgaacggcaccagatggttcttgttgtagcggttggtcgagtcgtagcggtacgggttatctttgccgagagtaatgatggtgttgtaggtatcgtaacggttctgcttgttgagacgcgcatcgacaatgccggtgatcagcgagctgtcttttgcgcgcagcagatcgtccatcatgctgaggaactgctgctggttgatctccagatccgggatcgccgattcaggccagataatcagctgcgagtggccgatatgcggctgggtcagcgccaggtaggttttcagggtattgaccagctgcttttcgtcccatttcatggcctgtgggatatcgccttgcaccagcgagacctgggtcgcgcgcgccggcagcagctgataccactggatatagcgcagcgggaacggcagggcgaacagcagcgcggcaatcgccagcggcttccagttgcgctggacgagggccagggccagcaggccgctgactaccatcagcaggaagttaatcgcctcgacgcccatcaccggcgcgaggcctttcagcgggccgtcaatctggctgtagccgaactgtagccacggaaagccggtcagcacccagccgcgcaggaactcggtgatttgccagacgacaggggcagcgatagccatccgtatccagttagttttaggccacagacgggcgagcaggccggcaaacaggccggtgtagagcgagagataggccgccagcagaacgacgaggaagacgttaaccgggccgggcattccgccaaactgcgcgatgctgacatagacccagttgatacccgtgccgaacaacccgagtccccagaaatagccgatcccggcgctttgcagcgggcgtcggttgagggttaacgcctgcagaccgatcagcgaaacgatagccgctggccagaagtcataaggtgaaaaagccagcgttccgctggctccaaacaacagcgccagcaacagacgtatgcgctggcgttcaagaagagaggcaaataccatttaggttaatcgtcccgttaattaacgcctgctgctacaggctattctttttgccagccggacgcggggcacctacaaccgtgtatgactcgcggtctcccggctggccatttcagcgctaccgcttactcttccagcttcggctggggagcgtcatcgggcagctttacatgcacctgaatgatacgacgactatctgccattgctaccttgaattggtaaccatcaatgtcgatagattcgccgcgggccggcagatggccgaaggcctgcatcaccagcccgccaatggtatccacttcttcatcgctaaagtgcgtgtcgaaggcctcgttgaagtcttcgatggaggccagggcgcgcaccgtccaggtgtggcggctcagctggcggaaatcgatatcttcttcttcgtcgtactcgtcttcaatttccccgacgatgagctcaaggatatcctcgatggtcaccagaccagagacgccgccgaattcgtcaataacgatcgccatatgatagcgctgtgagcgaaactctttcagcatgcggtcgacccgcttgctttccgggacgacaaccgccggccgtaacactttttccatgctgaaggcttcggcgtcgctgcgcataaacggcagcagatccttggccatcagaatcccttcgatgtgatctttatcttcactgatgaccgggaaacgcgagtgggcggattcgatgatgacatccaggcactcgtccagcgtctggttgcgtttcagggttatcatttgtgaacgggggatcataatgtcgcggacccgctggtcggcgatatccattaccccttcgagcatgtcacgcgtatcttcatcgataaggtcgttttgcccggaatcacggatcagcgccagcagttcatcgcggtttttcggttccccgtgaaaaagctggctgagtaacagggagaaaaatccctttttgctgtttactgtgtcactactgtgtgaattgtcgtcgctcatggcgtcgtttgggttctcatgttgatttaactgtcgctcgtcgcgcgtaaactcagcgccagacggcatgggttgcctgactttctggcaggtaaaacgcagaaacagcggccggatgaggcgcaagcaccgccatccggctgggcgctattccgcaatcttctcggaaatgtacgggtcctcatagcccagagcaagcattatctctgtttcaaggccttccatctcttccgcttcgtcgtcttcgatatgatcgtagcccagcagatgcaggctaccgtgcaccaccatatgcgcccagtgcgcctccagcggcttaccttgctcgctggcttcttgctctaccacctgacggcagatgatcagatcgccgagcagcggcatttcaattcccggcggcgcttcaaacgggaaggagaggacgttggtcggcttatccttgccgcgataggtcaggttcagctcatggctttctgcaacgtcgaccagacgaatcgttaactctgactcctcctgaaacggcggaatgacggcgtcgacccagcgttggaaaagggcttcgtccggcaggccgctggtctcttcgcaggccagctgtaaatcgaggatcacctgactcatttttgctcctgttcctgggcttcgcgtttgcgctcggcggccagctctgctttacgtttctggtctgcggcttcccatgcctcataggcgttcacgatgcgggcgaccaccggatggcgcaccacgtcttcgctatggaagaagttaaagctgatctcatcgacttccgccagtacttcgatggcatggcgcagaccggatttggtgctgcgtggcaggtcaatctgcgtgatgtcgccggtgatcaccgccttggagttaaagccgatgcgggtcaggaacatcttcatctgttcgatggtggtgttctggctttcatcaagaatgataaaggcgtcattcagcgtccgtccgcgcatataggccagcggggccacttcgatgacgttacgctcaatcagcttctccactttctcaaagccgaacatctcaaacagcgcgtcatacagcgggcgcagatacgggtcgaccttctggctcagatcgccgggcaggaagccgagcttttcgcctgcctcgacggccggacgggtcagcagaatacggcggatctcctggcgctccagcgcatcgaccgccgccgccaccgccagataggttttacccgtacccgccggacccacgccgaaagtgatgtcgtgatcgaggatattggcgatgtactgcgcctggttcggcgtacgcggtttgattaccccgcgcttggtcttgatattgacggctttaccgtactcaggcacgctttcggcgctctgctccagtacgcgcgcttccttgatcgccaggtggatctgctctggttcaatatcctgaatctgaccgcgcattggcgctgtgtcgacatacaggctgcgcagaatatcggcggcagcgtgcacgcacagggcgcgaccggtcagcttaaagtgattgtcacggcggttgatctcaatgcctaaccgacgctccagctgtttaatgttgtcgtcaaacgggccgcacagggctaacaggcgtgcgttatccgctggctccagggtaatctcacgagtgtctatgttcaaactattcctctttacgcaggtggccggacgcggcgcgtggccggctaatcaggaaattatttacgtcacaggaaaatggcgcaagcattgctgtagatatagggacggagagaggaattacaaggcctgccggaaccgacaggcctgaagggatcatggctggtaaattcccacgccaagatcgttctctttacgggtgcgggcaatcactgattcgggtgattcagcgatacgcagacccatctccgcttcggtgcgcacgattttaccgcgcagcgagttggtatatacatcgacgatttcgacatcgacaaacttaccgacgaggtccggggtaccttcgaagttgaccacccggttattctccgtacgtccggagagctccatgatgttcttacgcgaggtgccttccaccaggatgcgctgtaccgtgccgagcatgcgacggctccaggccatcgcctgctggttaatgcgttcctgcaggatatacagacgctgttttttgtccgcctccggcacgtcgtcgaccatatcggccgccggggtgcccgggcgagcggagaagataaagctgtagctcatatcgaaattgacgtcggcgataagcttcatggtcttttcgaaatcttccgtggtttcgcccgggaagccgacgataaagtcggagcttatctgaatatccgggcgcgcttcacgcagcttgcgaataatcgctttatactccagcgcggtatgggtgcgtcccatcaggttcagcacacggtcggagccactctgcaccggcaggtgcaggaagctcaccagctccggcgtatcgcgataaacgtcgatgatatcgtcggtaaattcgatcgggtggctggtggtgaagcgaatgcggtcgatgccgtcgatggcggcgaccaggcgcagcaggtcggcaaagctgccggtggtgccgtcgtaattctcaccgcgccaggcgttaacgttctgccccagcagattgacctcacgcacaccctgcgccgccagctgggcgatttcaaacaggatatcgtcgcacggacggctaacttcttctccgcgggtatacggcaccacgcagtaggtgcagtatttattgcaaccttccataatcgagacaaaggcggtcggcccttcggcgcgcggctctggcaggcgatcgaatttttcaatttccgggaagctgatatcaactaccggactgcggttgccgcgcacggagttaatcatctccggcaggcggtgcagggtttgcggcccgaaaataatatcgacatagtgcgcgcgctggcgaatatggtcgccttcctgggaagccacgcagccgccgacgccaataatcaggtccgggttcttctctttcagcagcttccagcggccaagctgatggaaaactttttcctgggccttctcacgaattgagcaggtattgagcaacagcacatctgcttcttccgccacttcggtcagttgatacccatgtgtcgcatccagcagatcggccatctttgatgaatcatactcgttcatctgacagccccaggttttaatatggagtttttttgtcattgacttgctcatgctcagtaatagatatccaaaacgcggggatatatacagggtgaatttcgcattccagggcgcgtattgtaatgctttggtcgccccctgaccagtgcgagcgttatcgccgcaagagggcgaaaaatccggtaaacttaacggattctgctttaaggataatagccatgacaattcacgtaacagatgtcgccatcgtgggcggcggcatggtcggcggcgccctggcgttagggctggcgcaacagggatttaccgtgacggtgcttgagaaagcggcgccaccggcgttcgatccggcatccgccccggatgtgcggatctcggcgatcagcgcggcttcggtcggcctgctgaagagtctcggcgtctgggatgccatacgggcgatgcgcgtccacgcgtatcgccgtctggagacctgggagtgggagagcgcgcacgtcgccttcgacgccgcggagctcaagctgccggagctgggctatatggtcgagaacaaggttctgcaatggggcctgtggcaagcgctggcggcgcatgaggcggttaccctgtgcgtcggtagcgaactgaaaacgatgcagcgcggcgagacgcagacggcgttgcatttgcgcgagggggagacgatccacgcccggctggttatcggcgccgacggcgctaactcccaggtgcgggagatggccggcatcggcgtgcacgcctggcaatatcagcagtcctgtatgctgatcagcgtcgaatgcgccgacgatcccggcgacagcacctggcagcagtttactcccagcggcccacgcgccttcctgccgctgttcgaccactgggcttcgctggtctggtacgacgccccggcgcggatccgtcagctgcagagcatgaccatggcgcagctccagcaggagatcgccagtcactttccggcgcggctgggacgggtgacgccgcaggcggccggcgccttcccgctcacccggcgtcatgcgctgcagtatgttcagcccggcctggcgctggtgggcgatgcggcgcacaccattcatccactggcggggcagggggttaaccttggctatcgtgatgtcgatgccctgctggagattctggcggaagcgcgcggccgcggcgaagactgggccagcctgccggtgctgaagcgctaccaggcgcggcggcgagcggataattttatcatgcagtcggggatggatctgttttatgccggtttcagcaatgacctggcgccggtgcggatgctgcgtaatattggcctgatggcggctgaacgcgccggggtgctgaagcgtcaggcgctgaagtatgccttaggcttgtaaaaccggcttcccgggcaggggcgtagcggagagcgcctgcccggcagtcagtacggagtaagcatgtcaggacgccaatagcaaaaaagcccaccgaagtgagcttttttgcattgaagtggctggggtacgaggattcgaacctcggaatgccggaatcagaatccggtgccttaccgcttggcgataccccaattgtctgttgcgcttgaccgtaactatgccggttgagggcaacagtgcgttcactgctgaacgacttttaaatttggctggggtacgaggattcgaacctcggaatgccggaatcagaatccggtgccttaccgcttggcgataccccaacaaattgtttgcggatttatcgatgcgtatcgatacgtccagaatttggtggctacgacgggattcgaacctgtgaccccatcattatgagtgatgtgctctaaccagctgagctacgtagcctaattgtcttactgcttcttcgatggctggggtacctggattcgaaccagggaatgccggtatcaaaaaccggtgccttaccgcttggcgataccccaataccgtcgcggtgaaccgcaaatatcgaagaaatatggctggggtacctggattcgaaccagggaatgccggtatcaaaaaccggtgccttaccgcttggcgataccccatccgtacaacgctaactggtgaatggtgcgggaggcgagacttgaactcgcacaccttgcggcgccagaacctaaatctggtgcgtctaccaatttcgccactcccgcaaaaaagatggtggctacgacgggattcgaacctgtgaccccatcattatgagtgatgtgctctaaccagctgagctacgtagccatctttttttcgcgtaaccttatcggcgttgcggggcgcattatgcgtattgggcctgcgagcgtcaacctctttttcaaggaaaatcgttgtaatgtgactgtttggttaggttgcgaacagctcgctggaatattcggcaattattggttatttatcgtttttcagcggtataaatccggcaaaaagaaaacggaccccggagggtccgttttgcgtttcaccgcccgtctgggcttatttgtaggccgactggtggacaccgaccgcgcggcctgatggatcgttcatggttttgaacgcttcatcccactcaatggctttcgctgaagagcaggccaccgacggaccgccagggacgcactccgccgcgctcggcaacgggaacagctcttcgaagatctcgcggtacagatagccttctttggaggtcggcgtgttgtacgggaagcggaagcttgcggtttccagttgctggtcgctgatctgtttggcggccacttctttcagggtatcgatccagctgtagccgacgccgtcagagaactgctccttctggcgccaggcgacgctggccggcaggtaggattcaaagcattcgcgcagaatgtgtttttccattttgccgttgccgcacatcttatcctgcgggttaatgcgcatcgcgacgtcgaggaacttcttgtcgaggaacggcacgcgggcctccacgccccaggcggacatcgctttgttggcgcgggcgcagtcaaacatatgcagcgcctgcagcttacgcaccgtctcttcgtgcagttctttggcgttcggcgccttatggaagtagaggtagccgccgaacacttcgtccgaaccttcgccggaaagcaccattttgatgcccatggctttaattttccgcgacatcaggtacatcggcgtcgaggcgcgaatagtggtcacatcgtaggtttcgatgtgatagataacgtcgcggatggcatccagcccttcctggacggtaaagtgaatttcgtggtgcacggtgccgaggtggttggccacctcctgcgccgctttcaggtcaggagagccttccagaccgaccgcgaaagagtgcagctgcggccaccaggcttcgctacgctcctgatcttcgacgcgacgggcggcgaatttcttggtgatagccgagatgaccgatgaatcaagaccgccggagagcagcacgccgtaaggcacgtcggacatcaggtggcttttcaccgactcttccagcgcctggcgcagctcgttcttatcggtaacgttgtctttcaccgcgtcgtaatcaaaccagtcgcgctgatagtactggcgaatttcgccgtctttgctccacaggtagctgcccgccgggaactctttaatggtgcggcataccggcaccagcgctttcatttcggaggcgacatagaagttgccgtgttcgtcatggcccatatacagcgggataatgccgatatggtcgcggccaattaagtacgcgtctttttcgctgtcgtacagggcgaaggcgaacattccctgcagatcgtcgaggaactccgggcctttttcctgatacagcgcgaggatcacttcgcagtcggaaccggtctggaactggtagcgatcgccatactccgcgcgcagcgcctggtggttgtagatctcgccgttaacggccagcgcatgggttttttcggcgttgtacagcggctgggccccggcgttgacgtcgacaatcgacaggcgctcgtgcgccagaatcgctttgtcgctggcatatacgccagaccagtccggaccgcggtggcgcatcaggcgggaaagctccagcgcctttttacgcagctcgcctgcgtcagttttaatatccagtacgccaaaaatagaacacatagccttctccattaccctgtcgtgtttgatgttgtgctggcttcgtctcgtggcgaagcctgagtgcgtgcttaagaaaatgccgtaaagggggagcaggcgcaagggttttgcggccggaaaaagaaaaaacgcaaccgtgattgttgaacagtgaaaaaagagtatcttttgaacggctttattgaggaattcgtatttataggccgtttttattagatggggtaattctgatggccgctagaaatgaaaaaccacgtcctgcgacgtggttggcatcagaaaatatcgatttccgcgacggaagggtaaatccacgacgggcggaacggcatgctgtcgatatcgtcgagggtggagacgccggagagcaccagaatagtctccagccccgcctggaaaccggccagtatatcggtgcgcaggttatcgccgacaatcaccgtctgctcggagtgagcctgcattttattcagcgctgaacggatgatccacgggctgggtttgccgacgtaaaacggcttacggccggagatcttctcgatcccggcgcacagcgcgccgcaggcagggtagaagccgcgaccgtgcgtatccgggttagtggcaatgaagcgggcgccgttggcgacgaagaaggcggccttatgcatcatttcccagttaaaggagcgagtttctccgacgatgacaaaatccgggttcacatcggtaatggtaaagccggctttgtacagctcgtggatcagcgccccttctcccaccacgtaggcttttttgccttcctggcgacgcagaaaatcggcggtggccatcgctgaggtgtaaaaggcgctatccggaacatcaattccagcggtggcgaaacggttcgccagatcctggccggtttgcgacgggtagttggtcagcattaccagcggcatgcctttatcgaggatgcgcttgataaactcggctgcgccgggaacggcgacgttatcgtgcatcagtacgccgtcaatatcacaaattatgttttgaatggtcatggtgggtccagaatcattaacaaagacgaaactatacgcgtcatcgatgaggtttcacacctctgacaggcgaggcccgcccgtatcaaggtgacgcgctatcagaaaaggggcgattagctctcaagcaaacgctgcagcagcgtgccattaagcatggcgcgtttgaccagcgcgaaggcgccgattgcagagcggtgatcgagggtggagcgcaccaccggcaggttcttacgaaacgccttaagcgcctgggcgttaatgcagccttcgatggccggaagaaggaccttttcagcttccactatttcgccggcgacgacgattttttgtgggttgaacaggttaatggcgatggcgatcgttttcccgaggtggcgccccacgtactcaatcacctcgcaggccagggcatcgcccttgttggccgctttgcagatagttttgatcgtgcagtcatccggcgtcagacggctctggtagccctgctccagcaggtggcgaacccgctgttcaatggcggcattggccgcgacggtctccagacagccgaagttgccgcagtggcagcgttcgcccagcgggtcgacctgaatatggccaatttcgccaacgttgccgttgcggccgataaaaatgcgcccgttggagataatccccgccccggtaccgcggtgcacgcgcaccagaatggagtcttcgcaatcctggcttgcgccaaaatagtgctcggccagcgccaggctgcggatatcgtggccaacaaagcaggtaacgttgaagcgtttctccagcgccccgaccaggccccagttttccaccgcaatatgcggcatatagcggatcacgccgctttccgggtcgacgaggcccggcaggatcactgagatagcgatcagctcgcgaattttgcgctgacagttttcgataaaggtggcgatgatattcagcagggcgtgttccagcgtttcctgggtgcgctcgggcagcgggaagtgctcctcttccagggtcttgctgcttaaatcatacagggtcagagtggcgtcatagcggccaagccgcacgccgatggcgttgaagttgcgagtttctgcgatgatagagatagcgcggcggccaccggtggaggcctgctgatcgacttctttgatcaggccgcgctcaataagctgacgcgtgattttggtcacgctggcaggggcaagctggctttgttcggctatctgaatgcgcgagatgggcccatgctggtcaatcaggcggtacacggccgcgctgttcagttgttttacgaggtcaacgttaccaatttgagcttgtccgcctgctgtcatacttttacttactcagtgacgacctcgttaccattaacgatggtcttggtgattttataatcgcgtgtaaaggcggtcaggttagcgaccatgcccggcgcaatgctgccgagctgcttgtccacgccgatagcgcgcgcaggatagagcgtcgccatgcgcaatacttcgtccagtgccacgccgcaatgctcaaccagattacgcaccccttcaatcatggtcagggaagatccgctgagggtgccgttttcatctacgcacagcccattgcggtagtatattgttttcccggcaaaaatgaactggtcaatattcgcccccgccggcgcggtggcgtcggtgaccaggcacagcttgtcgcctttcaggcgcttggcgttgcgcacgttggcgtaatcgacgtgcatcccgtcgacgatgataccgcagtagacatccggctcgtcaaaaatcgccccggcaagacccggttcgcggccggtaatgtacggcatcgcattatacaggtgggtggcgaaggtaatgcccgcacggaagccgactttcgcctctttcagcgtagcgttggagtggcccgcggagacaacgatcccggcggcgaccagtttgcggatcacttctggctcaacgcgctcaggggcgagggtcactttggtgatcacatcggcgttgtcgcacaggaaatcgaccagcgccgcgtccggtttacgcacgtagtccggattgtgggtgcctttcttaacgatattcagccacggcccttcgagatgcaggcccagcgcctggttcggatgtttttgcagatattcgcgcatcacgcgcacgccttgcttcatcagatcgtcgctggaggtaatcagcgtcggcaggaagctggtgcagcctgagcgttcgttggccttctgcatgatctccagcgtttcgacagtgaccgcctctgggctgtcgttaaactgcacgccgccgcagccgttgagctggacgtcgataaaaccgggggcgattattgcgccgttgactgagcgctgctcgatgtcagacggcaaatctgccagcggacaaagacgttcgataaagccattagcgataacaaccgcatggtcatcgagaatttcatgaccggtataaacccggccctgggttaatgcatacattacgacccccggtatatacgcctcatcaggtcagcgttcgttcgtttgccgccggcatgatggtgcgtacaaagaaaaagatgatcccgcgccagggcgcgggaaggactacattacagacctttaatattttcagcttctaattcgttgaaatattttagcgtcttcactttcagctccatggtggacggttcgtcgcagacgatcaccgccttcggatgcagttgcagacaggtaatggtccacatgtggttgacgttaccttctaccgccgcctgcagcgccagcgctttctgatgacccagcaccagaatcatcacttcttctgcgtccagcagggtgcccacgccgacggtcagcgcatatttcggcaccagatccacatcgccgtcgaagaagcgggagttcgctacgcgggtttcatgggtcagggtcttaatacgggtgcgggacgccagagaagaggccggttcgttaaacgcgatatgaccatcgttgcccacgccgcccatgaacaggtggattttaccgtaggaacgaattttttcttcatagcgacggcattccgcatcgatgtccggcgcgttaccattcagcaggttgatattttctgccggaatatcaacgtggtcaaagaaattacggtgcataaagctatgatagctttccggatgctctttcggcaggccaacgtattcatccatgttaaaggtgacgacgtgcttgaagctaacctggcctgctttatgcatttcaaccagcgccttgtaggcggtcagcggggtaccaccggttggcagacccaggacgaacggacggtccgcggttggtttaaatgcattaatgcggttaacgatatggcgggcagcccatttaccgacctgctcagcggttaccaggggaatcagtctcattcttcacctctatagtcaaagtagattctggcggattggcgccagcactctaaggagagtattgcagcaactgcgccgaccggggtcaatccgtgttgattttttgaatgataaaataagttttcgttgttagccagtgcaagggaggagggaatacgatatttggtgataattatcacaaaaaacacccgtttaatttgcgatacgaattaatttttcacacactttgccggtaagtgataaaaccgaccttgttacacaataaaaaagtggctttgaaatgagcctcatcggggtctcatagggggaataagatgaatattttaggtttctttcagcgactgggtagggcgttgcagctccctatcgcagtgctgccggtcgcggcattgctgctgcgtttcgggcaaccagacctgttgaatgtacccttcatcgcgcaagcgggtggggcgatcttcgataatctggcgctgatcttcgcaattggtgtggcatcaagctggtccaaggataacgccggttctgcggcgctggccggtgcggtagggtatttcgtgatgaccaaagcgatggtcaccatcaacccggaaatcaatatgggcgtgctggccggtatcattaccggtctggtggcaggggcggtatacaaccgctgggccggcatcaagctgccggacttcctgagcttcttcggcggcaaacgcttcgtgccgatcgccaccggcttcttctgtctgatcctcgcggcgatcttcggctacgtctggccgccggtgcagcacgctatccactctggcggcgaatggatcgtctccgcaggggcgctgggttccggtatctttggtttcatcaaccgtctgctgatcccaaccggtctgcatcaggtgctgaacactatcgcctggttccagattggtgagttcactaacgccgctggcgctgtgttccacggcgacatcaaccgcttctacgccggcgacggcaccgcggggatgttcatgtccggcttcttcccaatcatgatgtttggtctgccgggtgcggcgctggcgatgtatctggcggcgccgaaagcgcgtcgtccgatggtaggcggtatgctgctgtccgtggccatcaccgcgttcctgaccggggtaaccgagccgctggaattcctgttcatgttcctggctccgctgctgtacctcctgcatgcggtgctgaccggtatcagcctgttcatcgcaacggcgctcgggatccatgcgggcttctccttctccgcaggtgcaattgactacgtgctgatgtacagcctgccggccgccagcaaaaacgtctggatgctgctggtgatgggcgtggtgttcttcttcgtctacttcctgctgttcagcgcggtgatccgcatgttcaacctgaaaacgccgggtcgtgaagacaaagccgctgacgtggtaacggaagaagccaacagcaacactgaagaggggctgacccagctggcgaccagctatatcgccgcggtgggcggaacggacaacctgaaagccattgacgcctgtatcacccgtctgcgtctgaccgtgggcgattcggcgaaggtgaacgacgccgcctgtaaacgtctcggcgcgtccggggtggtgaaactgaataagcaaaccattcaggttatcgtcggtgcgaaagcagagtctatcggcgatgagatgaaaaaagtggttacccgcggcccggtagcggcagcggcagccgcaccggctggcaacgtcgccaccgcagcgcccgcggctaaaccgcaggcggtagcgaacgcgaagaccgttgagtcgctggtttcgccgattaccggtgacgtggtggccctcgagcaggtgccggacgaagccttcgccagcaaagccgttggcgacgggatcgcggtgaaaccgaccagcaacatcgtggtggccccggccgccggtaccgtggtgaaaattttcaacactaaccacgcgttctgcctcgaaaccaacaacggtgcggaaatcgtcgttcacatgggtatcgacaccgtggcgctggaaggcaagggcttcaaacgtctggttgaagagggcacggacgtgaaggcgggtgagccgattctggaaatggatctggacttcctcaacgccaacgcgcgctcaatgatcagtccggtcgtctgcagcaacagcgatgactacagcgcgctggtgatactggcgagcggtaaggtcgttgctggccagacgccgctgtatgagattaaaggcaagtaaggctcctgagtcgagtttttgcctcagcggcgaagggaaaccttcgccgcttttttttccagcaatcggccccataatcctcttctgatacctattttacgtaactaatagttgtcactacgccctgcttgtaagatcatgtgccgttatacgttgtttacgctttgaggaacccgtgatgagtgaggcagaagcccgcccgactaactttatccgtcagattattgatgaagatctggctaccggtaaacataccaccgttcacactcgcttcccgccggagccgaacggttatctgcacattggccatgcaaaatccatctgcctgaacttcggcatcgcccaggattatcagggccaatgcaacctgcgtttcgatgacaccaacccggtgaaagaagatatcgaatacgttgagtcgattaaaaacgacgtgcagtggttaggtttccactggtccggggacgtatgctactcgtctgattatttcgatcagctgcatcagtatgcggttgagctgatcaacaaaggtctggcctatgttgatgaactctctcctgatgaaattcgcgaataccgcggcaccctgaaagcgccgggtaaaaacagcccgtatcgcgaccgcagcgtggaagagaacctggcgctgtttgaaaaaatgcgtagcggcggcttcgaagagggcaaagcctgcctgcgcgcgaagatcgatatggcgtcgccgtttatcgtgatgcgcgatccggtgctgtaccgcattaagttcgctgagcatcatcagactggcaacaagtggtgcatctacccgatgtacgacttcacccactgcatcagcgatgcgctggaaggcattacccactcgctgtgtaccctggagttccaggacaaccgccgcctgtacgattgggtgctggacaacatcagcatcccggtgcatccgcgtcagtacgaattctcgcgcctgaatctcgaatacaccgtgatgtccaagcgtaagctgaaccagctcgtgactgagaagcacgtggaaggctgggacgacccgcgtatgccgaccatctccggtctgcgtcgtcgcggctacaccgccgaatccatccgtgagttctgcaagcgcatcggcgtgaccaagcaggacaataccatcgagatggcgtcgctggagtcctgcattcgtgaagatctgaacgaaaacgccccgcgcgcgatggcggtgatcgatccggtgaaactggttatcgagaactatccgcagggcgaaagcgaaatggtggtgatgccgaaccatccgaacaagccggaaatgggcagtcgtgaagtgccgttcagcgccgaaatctggatcgatcgcgcggacttccgcgaagaagccaacaaacagtacaagcgtctggtgctgggtaaagaagtgcgtctgcgcaacgcctacgtcatcaaagcggaacgcgtggagaaagatgccgaaggcaatattaccaccatcttctgcacctacgatgccgacaccctgagcaaagacccggccgacggccgcaaggtcaaaggcgtgatccattgggtaagcgcggcgcatgcgctgccggtagagatccgtctctacgatcgtctgttcagcgtgccaaacccgggcgcggcggacgatttcctcgcggtaatcaacccggaatcgctggtgatcaaacaggggtacgcggagccgagcctggcgcaggccgaagccggtaaagcttaccagtttgagcgtgaaggctatttctgcctcgacagccgctatgcaaccgcaaccaatctggtgttcaaccgcaccgtcgggctgcgtgatacctgggcgaaagcgggcgaataacatttcttttctgtcaaagcgtcgctcccagcggcgctttttttgtttcagaatcagctaattaaacttttcattttcgcgatgcgaattaattctgtttctgcgcggtaataaatagcgcttctgatgtttcctgtcacatacaaaaaaccaatgtaatcgctttcaatgattgcgtttttccctgattttgcaatgacttccataacaaaatcatcagagataagactgtaacaaaacgacataaaatatgtgcgctttgtcataatcttaagctttgcctcacgaaaaacattgataattcgcgtcacgaaaaatagtctatctatagtggtttcgcggtcttttttaccgccccacattttgcagttttatttattttttagcgattgaccgctggtcttcgccttttaaaacgtcaaagaggatatgcacatgcgtacgtttagtggcaaacgtagtacgctggcgctggctattgccgccgtcaccgcgatgtcgggctgggttgtggctccacaggccagcgcagcaggctttatcgatgattcaaccttaaccggcggtatctattactggcagcgtgagcgtgaccgtaaagatgtgaccgacggcgacaaatacaaaaccaacctttcccactccacctggaacgccaacctggacttccagtccggctatgccgccgatatgtttggccttgatattgccgcgtttaccgcgattgaaatggcggagaacggtgatagcggtcacccgaacgaaattgccttctcgtcacgtaacaaagcctatgacgaagactattccggcgataagagcggcatcagcctgtataaagccgcagcgaaattcaaatatggtccggcgtgggcacgtgcgggctatatccagccaaccggccagactctgctggccccgcactggagttttatgccaggtacctatcagggggcggaggccggggctaacttcgactatggcacggcgggcgcgttaagtttctcctatatgtggacgaacgagtataaagcgccatggcatatcgagatggacgatttctatcagaacgataagaagaccaaagtcgattatctccactccgtcggcgctaaatatgatttcaaaaatgacctggtgctggaggcggcatttggtcaggctcagggctatatcgatcagtactttgctaaagccagctacaagtttgatgtcgccggcgcgccgctgagcaccagctaccagttctacggcacccgcgataaggtcagcaacggcggggtcaacgacatctatgatggcaccgcatggctgcaggcgttaacctttggttataaggtggcggatgtcctggatctgcgtctcgagggaacctgggtgaaggctgatggccagcagggctacttcctgcagcgtatgaccccgacctacgcctcttccaatggtcgtctcgatatctggtgggataaccgctccgactttaacgccaacggcgaaaaagcggtcttctttggcgcgatgtatgacatgaaaaactgggatatgccgggctgggcgttcggcgcgtcttatgtctacgcctgggatgcgaagccgggccgaatgtcctctccggatgcgtactatgaccctgactatcgcctgaaagagtcggcctatagcctggatgcaatgtataccgtacaggaagggcgggcgaagggcaccctgttcaaactgcactttacccaatacgacaaccattccgatattccgagctggagcggcggctacggcaacatcttccaggatgagcgcgacgtgaagttcatggttatcgccccgttcactattttctgatgcctgcgcggcgggcgtgagcctgccgcacctctgggagaacgacaatgaaaaaaatgctgcttattgccatgatggcagcgggcctggtggcctgcaccacgtcgccggcgccgaaagaagacaccaaactgaaagatgcctatagcgcctgtattaatacggcggaagggaatccggacaagattgaagcctgccagagcgtactgaatgtgctgaaaaaggataaacagcaccagcagttcgccaaccaggagagcgttcgcgtcctggattaccaacagtgtattcaggccacccgcaccggcaacgatcaggcggtgaaagcgcgctgcgatcagatctggaaagagatccgcagcaataatacgacccattaaatcagacgacagcggcaaacgggcggggcatatctccgcccgtttgttttttttgcgctgactctccgccggctgatagccgcggctcagccgcacgaacaacaggacggtggcgacgaacccgcatagcgcggcgcacattagccaccagcccggcgcgcttttatcgccggtgagctcgaccagggctgtggaaatagctcgcgtcagtccgccgaagatcgtggtggcaaggctgaaggccagcgaaaagcccacggtgcggacgtgtaccggcatcacttcggtaagcgccgcgaccatcgcgccgttatacatgtcaaagaagaacgagaaccataccaggaccagcgtcatacgggtgaaatcgggcgcgacggtgagccagtgcatcaccggccaggtggtgagcagcgccagcacggtaatgcccatcagcaccggacgacgaccgatccggtcagagatcgccccgctggcgaagttccatatcaactctccggacaaagcggggacgaggaaagtcaccccaggggcgtgtgcgggaagggcgccagaggcgcccataaaaaagccaaccggcaggttggcttttcagtctcagcgaaacggggaattatttttccaccgcgtcgtgggcgtgttcgtcctcgcggcaatccccttccgcacagtgaccgtacagatacagactgtggttggtcaggcggatgccgtggcgggaggcaatttcacgctggcgtaattcgatcgagtcgtcgctgaattcgatcactttgccgcagtcgaggcagatcaggtgatcgtggtgatgctgctgggtcagttcgaaaacggattttccgccttcgaaattatgacgagtcacgatgccggcgtcatcaaactggttgaggacgcggtaaacggtcgccagaccgatctcttcgcccatgtcgatcaggcgtttatataagtcttccgcactgacatgatggttatccggttcctgcagcacttcaaggatttttagtcgaggaagtgtgactttcaggccagccttctttaatgcggtattgttgtcagtcatgcggaatctgtcctgttgctaaacgatctacttccttcaacggaagtcatacagaaattaacccgacgtaatgcgtctcattatagaactgccactggtaaatgaaaactgcaagcatcaggcctggtttgctgtcaaaaacgaggcaccagctacaaactgcgtcacgtgcctcgtagaatcagaggacattgtacagatatgtgattaaaagttaaaaacttgtagctattagtttgattgcttttgtctattaatgcggcgcaactcaatgattgcgccgcttaatcatcaggcgtttttgatttcttcgaggtgcagctcttcggcaacctgcttcacccatttctcaacgcgctcgttggtcagctccggctggcggtcttcatcgatggcgaggccgacgaagtggtcgtcatccgccaggcctttggaagcctcaaaatgataccccgccgttggccagtgaccgacgatggtcgcgccgcgcggctcaatgatgtcgcggatggtgcccagcgcgtcgcagaagtattctgcgtaatcttcctggtcgccgcagccgaacagcgccaccagtttgccattgaagtcgatctcttccagcgtcgggaagaagtcatcccagtcacactgcgcttcaccgtagtaccaggtcgggataccgagcagcaggatgtcgtgggcttccaggtcttctttgctgcttttggcaatgtcgtgaacatcagcaacatctttaccaagctgcttttgaatcatttttgcaatattttcggtgttgccggtgtcgctgccaaaaaagatgccgatgattgccatgagtaaaataacctcttgaaacttaaatgatgtggtagggacgcaatgcccatagataacggcaatcatagcagaacaggcaagggcgcggaaacagcaatcacgcccgactgcacactctgctacatgaatgcgggtttttcgcggaaagttagacttttccctggctgcgcagggcggttaactgggtcatcagcatctcttcaatgagatcgctgcggctcatattacgcgcttccgccagctcgttgagcgcatcgaccgcatcggcgttgagttttaactccacgcgcttcagcccgcgaaccttatcgcgtttcagctggttacgtttgttgatgcgcagttgttcatcgcgcgacagcggattggttttcggtcttcccgggcgacgctcgtttgcgaacaaatctaatgtcgtacggtccgtttgttcttttgccatgattctgagtgacttcggggaaacaagctgccgggctctagccggcgcagatagcgcgccatcatacatcaggcgaacggctgcgccaacgaccgtgggcattctgcggcgcggtcgggcatattttagccaatcaggcggcgatgctcgtcagatagcggcggatggcgcgtaacaccgcctcgggtttctcagcatggacccagtgtccggcgccggcgatgacgtgggcccgggcctgcgggaactgggccagcagcgcgtcgcggtaggcgtcggtcacatagggcgagttgccgccgggaataaactgcgtcgggtgcggccaggccgggatggtttcccagccgacgatatgcggatactggtcccacagcaccggcacgttgaagcgccagtcgccgtcgacgaatgatttcagcaggaactgaatcacgccttcttcctgcaggtgctcgcgcatcacctgcgccgcctgctggcgggtgctggcggcggattcgctgacggcgcggatagcggcgaagatctcatcatggcggcgaacgtgataatccaccggcgcgatatcgatcgccaccagaccgctgatgcgttcaggcgccagggcggtaagcgccattaccgctttcccgcccatcgaatggccgataaaggtggcgcgctcgatctggtgcgcgtcgagcgtatcaagcagatcctgcgccatggcggggtaggtcatctctggcgaccgcggcgacaaaccgtggttgcgcatatcgacctgcacaatatcatggtcggcgatcaggtcgcgggcgaggatgcccaggttgtccaggctgccaaacagaccgtggaccagcacgatcggggagtggttgtgcggattctgtgcagattgcgctcggctatttaatttcatggcaaagttctttttttcgctccgtcgggttagggtattatgttggacattctgccatccggctgcaagacccagaagttttctgagttttaccgccatcctggtttgacgctatccgcggttgggatttgtacttataatcccaacgatttgtattcagaaaagatatcgcactggattaagatgaaaacaattgaagttgatgatgaactctatcgctatattgccagccacactctgcatatcggcgagagcgcatccgacattttacggcgtatgctaaaattttccgccgtttcccaaccggctacaccggtcagcaaagccgcgccgacgctggcgccagcgcctgtcgctgaggtgaaacccgctaacccggtgaaagataaagtccgcgccatgcgcgagatgctgttatctgatgaatacgccgagcagaagcgcgcggtgaaccgttttatgctggtgttgacgaccctctactccctggacagtaaagcatttgccgaggccaccgagtctctgcacggccgcacgcgcgtttacttcgcggaagatgcgcgtacgctgctgaaaagcggtaatcagaccaaaccgaaacaggttcctggtacaccgtggtgggtgatcaccaataccaataccggccgtaaatgcagcatgattgagcacatcatgcagtcgatgcagttccctgcggagctgattgaaaaggtttgcggcacgatctagctttttaacatttgcaccagaaggatcaggcaatggcaatcgataaacgtgcggggcagcctgcgcaacagagtgatttgattaacgtcgcccaactgactgctcagtactacgtgctgaagcctgaagtcggtaatgcggagcatgcggtaaaattcggcacctctggccatcgcggtagcgcggcgcgccacaacttcaacgaaccgcatatcctggccatcgcccaggccattgcggaagatcgtgcgaaaaacgggatcaccggtccgtgctatgtcggcaaagatacccacgccctctccgagccggcgtttatttcggtgctggaagtgttaaccgccaacggcgtcgacgtgatcgtgcaggaaaacaacggcttcaccccgacgccggcggtctccaacgcgattctggtgcataacaaaaaaggcggtccgctggcggacggcattgtgatcaccccgtcacacaacccgccggaagatggtggtatcaagtacaatccgccaaacggcggcccggctgataccaacgtcaccaaagtggtggaaaaccgcgccaacgaactgctggccgcgggcctgcagggcgtgaaacgcatttctctggacgcggcgctggcttctggccacgttaaagaacaggatctggtgcagccgttcattgaggggctggcggatatcgtcgatatggccgcaatccagaaagccggcctgacgctgggcgtcgatccgctgggcgggtccggtatcgaatactggaagcgcattggcgagcactacaagctcaatctgaccattgttaacgatcaggtggatcagaccttccgctttatgcacctcgataaagacggcgccatccgcatggattgctcctcagagtgtgcgatggccggcctgctggcgctgcgcgataagttcgatctggcgtttgctaacgacccggattacgaccgccacgggattgtcaccccggcggggttgatgaacccgaaccactacctggcggtagcgatcaactacctgttccagcatcgtccgcagtggggcaaagaggtggcggtgggtaaaacgctggtctcctccgcgatgattgaccgcgtggtgaacgatctgggccgcaagctggtggaagtgccggtgggctttaagtggtttgtcgacggcctgttcgatggcagcttcggcttcggcggcgaagagagcgccggggcctccttcctgcgcttcgacggcacgccgtggtccaccgataaagacggcatcatcatgtgcctgctggcggcggaaatcaccgcggtgaccgggaaaaacccgcaggagcattacaacgaactggcggaacgcttcggtgcgccgagctataaccgtctgcaggcttccgcgacctccgcgcagaaagcggcgctgtccaagctctctccggaaatggtcagcgctgacaccctggcgggggatccgatcactgcccgtctgaccgcggcgccgggcaacggggcggcgattggcggcctcaaggtgatgaccgacaacggctggttcgcggcgcgtccgtcaggcaccgaagacgcctacaagatctactgcgaaagcttcctcggcgaagagcatcgcaagctgattgaaaaagaagcggtagagattgtcagcgaagtgctgaagaacgcttaacgacgcactaccatcaggccccttgcgggcctgatttttttcgcaaggatagcgatgaaaatacaacggaagtctctgtttttgttctgggcgtggatggatctctttttcgtcctgcaattcttatggtggaatattgcccaccgccgcctccctttttacgacgatctgctggcttatctccagctgctgcacacctggggctccgcggcggtctggctgtacccgctgaatgttctgctgattatcagcatcccgctatcgatgatcttttttttccgccagagccgctatgcgctgtggctggcctgggggcaggcgccgctcaggctgctgttcatgcagccttcgctattgctgggcctgtggctgattcaggctgccggcgtccggcatgtagcgatcctggcaggctttctgctgctctctgaagggctgaaaatcgccagcctctggtactgcagaggcgggattcagggcataaagcgatagccaatcccggtttcggtcagcaaatgctgcggccgtgccggatcggcctccagcttttgtcgcagatgacccatatagatccgcagatagtggctgtgctccacggcgttaggcccccacacctgattcagcagctggcgctgggtaagcactttgccgggattattcaacagcgccgccagcaggcgaaactcgataggcgtcaggtggatctcttcgctgccgcgcaggatgcggcgggcggggatattgacctccaggtcagcgaagcgcaccaccggctcatcggcctgcgccgcgccgtggcgacgcagcgcgacgcgcaggcgggcctgcagctcgccgatgccaaagggtttacttaagtagtcatcggcgccggcatccagggcggcaattttgtcatgctcttcgctacgcgctgacaggacgataatcggcatctggctccactgacgcaggtcgcgaataaaatcaatgccgtcaccatccggcaggccgagatcgaggatcgcgaggtcgggcttacgggtggcggcttcaatcagcccacgctgcagggtttccgcttcaaatacgcgcatgccgtcggcttccagcgcggtgcggagaaagcgtcggatagcgtgttcgtcttcgataatcagaacgttaatcacaattcctcaggtagctcttccagttcagggggcgtttctcccggcagtgtaacacggaatgaggcgccgccctcgggccggttgctggcggagatggtcccgccgtggacgtcgacgatggcctgacagatggcaaggcccagcccgacgccagggatcgccgactctttgttgccgcgggcgaatttatcaaagatagtctgctcctggcctgccgggatcccaggaccgttatcccatacctccagcgacagctgccgggcgtccgcctcggcgcggatgccgatgctcgcccgggcgccggcatacttatgggcattttccagcaggttgatcagcacccgctcgaacagcggtccgtcgacatgcaccagctggaggggatcgggtaaatccagctgaatatgctggccgccgaggcttggctcgagcatgcgcagcgcgctgccgaccacttcctccagcgtcagccactccttatgcagattaaagccgccggactggatccgcgccatatccaacaggttgttcaccagccgggtggtgttgagcacatgctggcggatttcgttggcctgcggggcatgttttgaaccttcgctggccagatcgagggtcagaatttccgcctggccaaacagcacggtcagcggagtacgcagatcgtgcgacagggcggcgagcagcgagttacgcaggctttcccgctcgctggtcagccgggcctgctcttcgctggcggtcagggtgaggcgctccagggcgctggccaccagcagagtaaaggtctccagcagccgctgctgctccgggatcatcaattggcgcagattctccggttccaccaccagtagtccccaggtgcgggcggcgctcttcaggggcaagatctgatacggcacgccgggcagggtatcggtgccggcgccggcaggttggcccttatcaaagctccagcgggcgatggcatcatcccacggggtcagccctggctggtgggttaagggcagcagttttccctgggcgtccgggagcagcagctggctgcgggcctgaaaggtggaggcgataaatcgctcgctggtggtggcgatatcctgctggctgcgacccaccgccagtgctttagacatctcatacagatggcgggtacggcgttcacggtagcgcgccacccgcgcctggtagcgcacgccggcggtgaggttgccgataagcaggcccacggtgagcatcacgccgaaggtgagcagatactggacatccgacaccgccagcgtcccgcgcggggcgacaaaaaagagatcgaagctgatgacgttgatcaccgtcgccagcaccgacggccagcggccatagaccagggcgatgatcaccacccccagcagatagagcatcaccaggttggcggcttcgaaagccatcaaccactgcatggccaccagggtaatgatggcgcatagcgccaccgccaccgcgcagccctgcagctgcaggcgccatttctccagcgccggacggctgtcgctggcgcgtgcggcaagggggaagggtttctcatcgagggcgatcaccaccagatcgaggtccggcgcatggcgagccagacgatcggcgaagccgctgcgatcccaccagcggcgcttgctttggcggccaatgacgattttgccgaggttatgttcgcgggcgtaatggaggaccgctttctcttccgacgggtcggagagggtggcggtttcggcccccagctcctgggccagacgcagcgcggcgagaatagcccgccgccggccttccggtagccggtgcagggaaggggtctcgacatacaccgcatgccagacgctgcccaggcgggcggcgagccgggcggcggcgcgcaccagcttttcgctgccggtattgtgcccgatacagagcaggatcgcatcgcgggtgtgccagactttctcctggccctggcggtcgcgccaggcgcgcatctgctcatcgacgcggtcggcggtgcggcgcagggccagctcgcgcagcgcaatcagattgcccttgcggaaaaagttttcgatagcgcgctcggcctggccgccgatgtagactttgccctcattgagccgctggcgcagatcgtcaggggggaggtccaccagcaccacgtcgtccgcggcgtcaaagaagggatcgggaaccgtttcccgcacctgcacgccggtgatcccgctgacgacgtcattcagactttccagatgctggacgttaacggtagtgaaaacatctatcccggcctccagcagttcatccacatcctgccagcgctttggatggcgggagcctggcgcattgctgtgcgccagctcatccaccagaatcaacgccggacggcgggcgagggcggcgtcgagatcgaactcatagacgtaccgcccgcgatgggcaagccgccgcggcggcagagtgctcaggccctgcagcatcgcggcggtctctttacggccgtgggtctccgccacgccaatcagaatatccagcccctgggcgcgcagccgctgcgcttccgccagcatcgcccaggttttccccaccccggcgcaggcgccaaagaacactttcagtttgccgcgatgcggggcggcggtgtgctgcagcaggcggtcagggtccgggcgcagcggctcgtcactcatttacttatccttcagggcatccagcgccatattgagttgcagtatattgaccaccggctggccaaggaagctcagcagcggggtttgtgtggcctgattcaccaactgggttacctgctcaacgctcagctggcgcgcttgagccacccggggcacctgccacagcgcggcggccggagtcaggttgttatcgagaccgctcgccgaggtggtgaccagttcgaccggcacccgcgggtcggcgtccgggttggcggcgcgcagggcctgcacgcgctcgctcaccgctttatccagcgccgggttgctggcggcgaggttgctgccgccagaggccatgggattatccgccgtctccgcggtggccgacgggcggccctgaaaatagcctgcggcggtgaagttctggccaatcagcgccgagccgcgcacttcaccgttcaggcggatcagcgagccgttggcctgtgagttaaaccaccattgtcccaggctggtggtaagcagaggatagacgccgccggtgagcagcgttaacagaataaatagcacaagtgccggacgaatcaatgacatagtttgttcctcacaccagaccgctcagggtcagcagcaggtcgatggctttaataccgataaagggcaccagcagaccgccgaggccgtagatccacaggttgcggcgcagcatcgccgaggcggagagcgggcgatagctgacgcctttcagggccagcgggatcagaaagacgatgatcagcgcgttgaagataacggcgctgaggatcgccgatgagggcgaatgcaggcccatcacgttcagcatggccagctgaggatagaccgcggcaaacgccgccggaataatggcgaaatatttcgccacgtcgttggcaatactgaaggtggtcagcgaaccgcgcgtcattaacatctgtttgccgatatggaccacctcaatcagcttggtggggttggaatccaggtcgaccatgttgcccgcttccttcgccgcctgggtgccggagttcatggccaccgccacgtcggcctgagccagcgcgggcgcgtcgttggtgccgtcgccggtcatcgccaccagccgaccttccgactggtactggcggatcagcgccagcttggcttccggcgtcgcttcggcgaggaaatcatcgacgccggcctcggcggcgatcgccgcggcggtcaggcggttatcgccggtgatcatcaccgttttaatgcccattttgcgcagctgggcgaaacgttctttgatgccgcctttgacgatatctttgagcgcaataatccccagcaccttttcgccttcggcgaccaccagcggcgtggccccctggcgagcgacctcttccacctgtttatcgacatcggcagggaagtggccgccgttggcctccacgtggcggcgaatggcgtccaccgaccctttgcggatcatgcgctgatcgatattgatgccgctcatcctcgtttgcgcggtaaaggggacaaaggtggcgtgcagcgactgcagatcgcgttcgcgcaggttaaagcgctgtttcgccagcaccacgatgctgcgcccctcaggggtttcatccgccagcgaggagagctgggcggcgtcggcgagggttcgctcttccacgccgcgagccggcaggaaggcggaggcctggcggttgccgagagtaatagtcccggttttatccagcagcagaacatcgacgtcgccagcggcttccaccgcgcggccgctggtggcgatcacgttggcgccgagcatacgactcatcccggcgacgccgatggccgacagcagccctccgatggtggtcgggatcaggcacaccagcagggcgaccagtacggtaacgctgaccgcattgccgctccacgccgagaagggccaaatggtggcggtggccagcaggaacaccagcgtcagggcgatcagcaggatcgtcagggcgatctcgttcggcgttttacggcgctgggcgccttccaccatggcgatcatccggtcgaggaaggtttctcccgggttcacgctgcagcggatcaccagccagtcggagagaatgcgtgtcccgccggtcaccgaggcaaaatcgccaccggattcacggatcaccggggcagactcgccggtaatggcgctttcgtccaccgaggcgccgccttcgatgacttcgccatcgcaggggataatatccccggcttccaccagtaccacgtcgcctttgcgcaggtcttccgccggcacgtgatcgaccggcgcgtcatgctgcggggtgcgcagtttgcgggcgaaggccgtttttttcacccctttcaggctgttggcctgggctttgctgcggccttccgccatcgcttcggcaaagttggcgaacagcacggtaaaccacagccagatactgacggcggcggtaaaggtggcgctaccggtcagggcgccgccagccatggcgatcgccagcagggtggttaacagactgcccacccagacgataaacatcaccggattgcgccattgcaccatcgggctgagttttttcacggcatccagcagcgcctggcgcaccagcgtcggctccagcagggctaattgtttgcgactcataacagggtgctccgcatcgctcaaagtaaggaaaagtgttcagccagcgggccaagcgccagcgcaggaataaaggtcagggcgcccaccagcagcacggtgccgatcagtaaaccgataaacagggcgtcgtgggtggccagggtgccggggctggccggttgaattttcttcgccaccagcgagccggcgatggccatcaccggaatgatgacggcgaagcggccgaccagcatgcagaacgccagcagcaggttccagaacggcgtcgccgcacccaggccagcgaaggcgctaccgttgttattggccgccgaggtgacggcgtacagcacttcgctaaagccgtgcggtccagggttgaacatcccggcgcggccggcgtcggtcatcatcgccagcgccgtgccgagcaacaccagcgtcggggtgaccagaatggcgagggcgatcattttcatttcccggacatcgattttcttcccgaggtactccggggtgcggccgaccatcagcccggcgataaataccgccagcataacgaacagcagcatgccgtacaggcccgagccgacgccgccgaataccacttcgccaatctgcatcagccacatcggcaccatgccgcccagcgcggtgaaggagtcatgcatggcattgaccgcgccgcaggaggcggcggtggtgatcaccgcgaacagactgctggcgagaataccgaagcgactctcttttccttccatattcaggctgctgtcggcacccagcgtcagcagatgcggattgccgcgggtctccgcccacatcaccacggcgacgcagaggataaagatcagcgtcattgcccacaggatggcgcgtccctgacgccgatcgcttaccacctcgccgaaggcgaagcacagcgccgccgggatcaggaagatcgccagcatctgcacgagattggtcagcgcggtcgggttttcaaacggatgggcggagttggcattgaagaaaccgccgccgttagtgcccagcagcttaatcgcttcctgtgaggcgacaggccccatcggcagcagctggtgcaccccttcgagggtggtaaagggctggtaggcctgcagattctgcggcacgccctgctgaataaagaacagggccaccagcagagagagcggcagcagcagccacagggtaatgcgcgtcagatcgacccaggcattgccgagggtcgacattttctgccgggcgaaggcgcgggtcagggcgaagaccacggcgatgccggtggcggcggagaggaaattctgcaccgtcaggccgaccatctggctgagataactcatggtgctttcgccggcgtaagcctgccagttggtattgctgacaaagctgatcgcggtattgagcgccagatcccatgacagccccggcaggtgctgcgggttaaacggcagcacgccctggagcatcagcagggcaaacagcgccaggccgccgagggcgttaaacagcaggatcgccagcaaatactgcagccagcccatctcctcggcgcggatcccggccacgcgccacaggacgcgctcgacgccggccaggccgggaagcgggatatcgttcaccattctcgccagacacatccccagcgggcgcgccagcaccagcaataccagcagatagctggctaataataaaaatccctgggcagccatcagaatgcctccgcatgtatcaaggcataaaccagataagccagtaacaggaacaccagcccaacgccagtgagtacgcctgcagtcacaatccacctccgggtgtgttttcgatttacctggaggatagaaattacggcgcaaagatttcgcaaaaatccgcgggtgcggtgtaaaaaaagtataaaaatgacaaaggcacaaattaactgatggttagtattaatttaactttttcgtaactaatttacgtggcgaatgtaaattaagtataaatacgtgctttttagtggtcggatgagtagtaaaattacaagcagagcggtattattttgctcagacaaacatgattaattttaccggcgctgcttgccggcctgacaaaggggagagaaatgatggcgttgtacaaagcttatcctgctcatattattttgctgcgtcgtgctttcgccgtcgtggctggtgtcgcagcgctgccggtgatgctgttctggaaagatcgcgcccgctactacagctggctgcaccgggtgtggtcgaaaaccagcgagcagccggtgtggatggcgcaggcggagaaagccgctcacgatttctattaatcctcctgctgcgaagaaaataacaagaccgccaggttgccccggcggttttttttcgccgcttgtctacactcgtttttatgcgccgccttggaattggcaggtgcgtattttgccggagcgcgctatttttgccggcttagatcataagatgagtattgctgacggataataaggagtgatatggccacccatctggtctggttacgcacggatttacgcattcacgataacctggcgctggctgccgcctgccgcgatccgcaggcgcaggtgctggcgctgtatatcgccaccccggggcagtggcgtgaacatcacctggcgccacggcaggccgcttttatcgccagccatttacagagtctgcatgccgcgctggcggaacggggcataccgctgtgggtagaagaggcggacgattttaccgccagcgtcgaacggctggccgatttttgccagcagcatcaggtcagtcacctgttctacaactatcagtacgaattcaatgaacgccagcgcgatgccgccgttgagaacaccttgtgcgacgtgatttgccagggctttgacgacagcgtcctgttgccccccggcagcgtactgaccggtggcggcgaaatgtataaagtcttcaccccgtttaaaaatgcgtttattcgccgtctgcgggacgggctgccggcgtgcgtggcggccccgaagccgcgccaggcgcctgcccgccaggcgccgccgctgcctgagcttaactacccgcaaacgccgtttgacgggctgctgtttgccgcggatgaaaaaacggcgctggcgcgtctgcgcgcgttttgtcagcaagcggcggcggattacgaggggcagcgcgacttcccggccgtggaagggaccagtcgcctgtcgccctgcctggccatcggcgtgctgtccccccgccagtgcctgcatcgtctgctgacggaacatcccgccgcgctggacggcggagccggcgccacctggcttaacgagctgatctggcgcgagttttaccgccatctgatggtctactatccgaagctctgtaaagggcggccatttactgcctggacagataaggtcgcctggcgcgcagaggaggcctccctacaggcctggcagcgcggggagaccggttttccgattgttgatgccgccatgcgccagcttaacgccaccggctggatgcataaccggttgcgcatgattgtagccagcttcctgaccaaagatttgcgcctcgactggcgggcgggcgagcgctatttcatgagccagctgattgatggcgacctggcggcgaataacggcggctggcagtgggcggcttcaacgggcaccgacgccgcgccctatttccgcatatttaatcccaccacccagggcgaaaagtttgataaacagggggtgtttatacgtcgctggctgccggagctggcaaaggtgccggagaaggccctgcatcagccgtgggcgtgggcggataaacaagggatcacgctggattattcgcgcccgatagttgatcacaagcaggcgcggcaggagacgctggcggcctgggaggccgccagaaaaggaattactccaccgccagacggcgggtcctgactttcagcgaatgatacagccagatgaccagcaccacgccgacgcaggccagcgcgccccaggtgatctggctgaagacggtaatgtaggcgtcaatggagtagttcaccgctccggcggcgtcgaatgacgcctgcgaggtctggtcggcgataacgccggccagatagttggcgatggcccctgagagcagcatataaataccggtcagcaccccagtgacacccgggatctcaatgcgggtgatctgcgacatcgcgaccgggtcgataaacagttcggcaaagcccatcaccgccagacccagcaccatcagcggcatggacgactgaccataggccgccgaccagcgggcgctgagggtcaaaatgcagaacccggcgctcatcaggcccagaccgagggcaaatttcccccagatgcgcacggtgcgattgccgttcacgctctctttcaccagccacgccagcaccatcccgcagagcatcaccgcgaaggcgttgattgactggaacatagcggtagggacttcgtagctcatgatatggcggttaacgaagcggtcaatatacaggctgatggagctcccgccctgttgggcgaaggcccagaacagcaggctgaaggcggtcaggacgacgatcaggcgcagatccttgcgctgtttatcggtttcggcgcgcaggtagatccgcgccagtaccgcgaggccaatggccgtggccacgatcagggcatacaccgaccactcctgccagaacagtaccgcaatcagcagcggggcggtaaccagcaacaccagcagccagccccagtttggcagcaggaagcggcgcgcgcacagcgcctggcggttgacgccagcggtatgctggaaatgacggttgccgcagaggaaaatcaccagccccgcgaccatgccgatggccgccagggcaaagcccatcgcccagctatactcctcctgtacgtagccgcaggcgatcggcgcgataatcgagccgatattgccggcggcatacatcagcgaaaagccgccatcgcgacgcggatcggcgggttcgtacagctcgcccagcagacagctgacgttggatttaaacaacccgtagccgcagacgatgatcgccagcgacaggtacaggaaaagcggagcggtttcgctggccccgagcaccagatggccaatggccatcagcagcgcgccgagcatgaccgccatccggttgcctaacagcttatcggccagatagccgccgaggatcggcgtcacatagaccagcgaacagtaggcgctgaacagggcgtaggcatggttatcgtcatatttgagctgattggtgagatagaggatcagcagggcgcgcatgccgtaaaagctaaagtactcccagatttgcagcgccacgacgtagtagatcgcccgcggctgcgatgatgttgtctgcatatgacgtgtgtttcctggcgtaaagcgaaagtcgatcgttctgcatgaatagcgatttatcagtcatattcatggcttgaggggctttctgattatttaatatgctttattagtgcataaatatacactaatgcgcggcgggatgaatagacaaattgcgggattcgttaaaaagtcatggtcagtgacggtagcggactatcgacgacccgaatggatatggttatgttatgcctttgtataacctgattatctgctggagtggcgatgaaaaatagcgaactggaacaactgattaacgacaagctcaatagtgcggccatcagtgacttcgcccctaacggtctgcaggtggaaggacgcgaaacggtgcacaagatcgtcaccggagtgacggcctgccaggcgctgctggatgaggccgtccgtctgcaggcggatgcggtgattgttcatcacggctatttctggaaaaacgaattgccagtgatccgcggcatgaagcgccgtcgcctgaaaaccctgctggccaacgatatcaatctctacggttggcacctgccgctggatgcccatccggagctgggcaataacgcgcagctggcgcatctgctggggattaacgtgctcggcgaaatcgaaccgctggtgccgtggggcgagctgtcgatgccggtttccggcctcgaactggcctcgtggatcgaagcgcggctggggcgcaagccgctgtggtgcggcgataccgggccggacaccgtcagccgcgtcgcctggtgtaccggcggcggccagagctttatcgacgccgcggcgcgctttggcgtggacgcctttatcaccggcgaagtgtcggaacaaactattcactctgcccgcgagcagggcctgcatttttatgccgccggccaccacgccaccgagcgtggcggcattcgcgccctcagcgaatggctgacggaaacgaccgatctggatgttacctttattgatattcctaaccctgcctgacgggagagaagaaagtgcagcgagcgcgttgttatctgttaggtgaaacggcggtggtcctggagcttgagcctccggtgaccctggagagccaaaaacgtatctggggactgacgcagcggttgaccgatcgcgaagaggtggttgaagtgatcccggggatgaacaacatcaccgttgtgctgcgtcgtccgcaggagatggcgtgggaggcgattgacaagctgcagcgctggtgggaagagagcgatgcgctggagccggaataccgtgagataagtatcccggttatctacggcggcgaggcgggaccagatcttggcgacgtcgcgcgccatagcgggttgagcgaaaagcaggtggttgaactgcactcttcggtggagtacatggtgtggtttctgggtttccagccggggtttccgtactttggcggcctgccggagcagctggcgatgccgcgtcgcgccgagccgcgcgtactggtaccggcgggatccgtcggcatcggcggatcgcaaaccggtatttatccgctggcgacgccgggcggctggcagctgctggggcgcacgccgctggcattattcgatccaaaacgtgaagagccggtgctgctgcgttccggcgatcgcgtgcgctttgtgccgcagaaggagggggtatgttgaaatttatccgcgccggcatgtatacctcggtacaggatggcggccgggaaggccagcgccagtgggggattagccgctgcggcgcgctggataaaccggcgatgaccattgccaatctgctggtgggcaatgcgccggaggcggcggcgctggaaattacgctgggtcaggtcgatgtgcagtttacccgccactgctggttcgcgttgaccggcgccgcctgtgaagcgacgctcgacggcgcgccggtctggttgggctggcgaatggaggcgaaggccgggcagcggctggtgctgaaaaatcctcagcatgggatccgcagctatctggcggtcgcgggcggtattgatgtccctgaagttttaggttcccgctctaccgatctgaaagtcggtatcggcggaatcgaagggcgccggttgcaggatggcgatcaagtgaagattgggaaatcgtcccgccgctttagcgcctcgcgcggcgttaaacagctgccgataggcaatattattcgcgcgctgccggggccggagtatcacgaattcgacagcgtgtcgcaggagtctttctggcgctcgccgtggaagctgagtccgcaaagcaaccgtatgggctaccgcctgcaggggcagccgctcaggcgcacaaccgaccgggaaatgctctctcatggcctgctgcccggcgtggtacaggtaccgcataacggccagccgattgtgttgatgaacgatgcgcaaaccaccggcggctatccgcgtatagcctgcattattgaagccgatatgtaccaactggcgcaaattccgctaggtcagccgatccatttcgtcccctgttcgctggaggaagcgctaaaagcgcgcgccgaccagcagcgctaccttgaacaactggcctggagattaagcgatgaaaattgatttaaatgccgacctcggcgaaggctgcgccagcgatagcgcgctgctgcagctggtctcttccgccaatatcgcctgcggctttcacgccggcgatgcggttctcatgcagcaatgcgtgcgcgaggcgctgaaaaacggcgtcgctatcggcgcacacccgagcttcccggaccgggaaaatttcggtcgaaccgcgatgcagttaccgccagagacggtctacgcccaggtgctgtaccaaattggcgcgctggcggcaatcgtacacgcccaggggggcgagctgcggcacgtcaaaccgcatggcatgttgtacaaccaggcggcgaaagagccgcctttggccgacgctatcgcccgtgcggtgcgcgatgccgacgccgacctggtgctggttgggctggcgggcagcgagcttatccgcgccggacagcattatcagttgacgacgcgccaggaagtcttcgccgatcgcggctatctggccgacggcagcctggtgccgcgtagccaaccgggcgcgctgattgagagcgaagagcaggcgctggcgcaaacgctggaaatggtgcagcacaaccgggtgcgcagcctgagcggcgaatgggcgcatgtaaaggcggaaacggtctgcctgcatggcgatggcgctcacgcgctcgatttcgcccgacgcttgcgcgccgcgtttgccgggcggaatatcgacgtcagcgcggacctcgagtaatagtccgcctaagttattaataataattaaatcaaataattaacaacactcacaatactcacaactgaacaggacgttattatgcaagaggcgatatccctctggccgctaatcggcattgccgtgattgtggtcggttttgtattacgctttaacccggtgctggtggtgattatctccgggatcgtcaccggcgtggcggcgcatatgccaatagccactattctggagaaactgggcgagggcttcctgaatacccgtaatctgccgtttattctgctgctgccgctggcggtgatcgggctgctggagcgccatggtctgaaagagcgggcgcaggcgtggatcgcgaagatccatagcgcgaccgccggacgtctgctgatcgtctatctgtttgtgcgcgaagccaccgccgctctggggttgaccagcctcggcggacatccgcaaatggtgcgcccgctgctggcgccgatggcggagggggcggcggaaaagcgctttggcccgctgccgggcaatgtacgctaccgcctgcgcgcgatgtcggcggcgaccgataacgtcgggctgttcttcggcgaagatatttttgtcgccttcggcgcgatcatcttcatgcacaactttatgctggagtcgggtgggatccagacagaaccgttgcatattgccctgtgggggatcccgacggcgatctgcgcctttctgatccacgccgcgcgcctgtggcgactcgatcgccatctccagcgcgagctggaccggataaacgccggacaggcgaaaggcggtgcggcatgaatttccagcaaacctatttatactggctggccggcgcggtactgctggtcgtggctatcatgtcctggcgcgacaaaagcaatccgcgacgtctgacaaccggtctgttctggggcctgtacgggctggtgttcttgctcggcgactggacatatcaactggtgggcgataagcgtaaggtgaatatcgctgtcggcggggtggtggtcgtcctggcgctgatcgccggttttggcggcgtgcgcctcggcagctaccatcagcgtagccaggaagagaaaaccgccagcgcgaaacgcctcggcaacaaacttttctttccggcgctggcgattccggtcgtcaccgtcattggcgtactgctgtttaacaatctgccctcatggcaggtggcgctcttcgggccgggcaaccacgcgacgctgattactctgttctcgatgactgtcggtacgctgattggcctggcgatggcgattcgtatgacgcatgaaacggtggcgcagccaatgcaggaagcgcgccgtttgcttgattccgtcggctgggcctttatcctgccgcaaatcctcgcggtgctggggctgctgtttaccgcagcgggcgtcggaaccagcatttcatggctgaccgagcactatctggcggtcgataaccgctttatcgccgtggctgtgtatgccatcggcatggcggtgctgacaatggtgatgggcaacgcctttgccgctttcccgattgtgaccgccggagttggcattccgattttagtcctgcagcacggcggcaatccggcggtaatggcggcgattggtatgttttccggctactgcggcacgctgatgacgccgatggcggcgaacttcaatattgtcccggcggcgctgctggaactgccggataaaaatgcggtgattaaagcccagataccgaccggtatcctgctgcttatcgtcaatgtattcttactctatttcctgatgttcctgtaaggagggatgatggctggcgtattgattaccggttttgagccgttcggcggcgaaacggttaacccttcatgggaagtggttaagcagctggatggcatgattattcgcggacagcaggtggtggctaaacagttaccctgcgtattcggcgaagcgctgacggtgctgaaggcggcgctggaaacctatcaaccgcggctgacgattgccgtcggacaggccggcggccgtgtcgatattaccgtcgaacgtgtagcgatcaatgtcgatgatgcgcggatccccgacaataaaggccagcaaccgatcgatgagccgatcgtcgctaatggccctgcggcctgcttcagtacgctgccgatcaaagcgatcgttagcgcgttgcgccagcaggggatcccggcctcggtgtcgcaaaccgcgggcaccttcgtctgcaatcacgtgatgtatggtttgctgcatcagttgcagggaaaaagcgggcagaagggaggttttatccatattccttatctgcctgaacaggcggcggcccacccggggcaggcgagtatgtcggtcgcgacggtacgcgcggcgctggaaacggcgattgccgtcgcccttgaacagaatgacgatgtcaaaattggcggcggcgccacccattaacagaaggatgacagtatgccggaaggtccggagatccgccgtgcggcggataaactggaggcggcaataaaaggcgaacccttaaccaacgtttggttcgcctttcctcagttgcaaccctatcaaactcagctaattggtcagcgggtgacccatatcgccacccgcggcaaggccctgttaacccacttctccggcggattgaccctgtatagccataaccagctgtacggcgtctggcgggtggtggatgccggcgttgagccgcaatcgaaccgcgtactgcgtgtcaggctgcagaccgccagcaaggcgattttgctctacagcgcgtcggacattgatatcctcacggcggagcaggttgccaaccatccgttcttgctgcgcgtcggaccggacgtgctggacatgacgttaaccgcggagcaggtgaaagcgcggctgctgtcggccaaattccgcaatcgtcagttttccggcctgcttctggatcaggcttttcttgccgggctcggaaactatctgcgggtggaaattctctggcaggtgggattaagcggtaagcgtaaagccgctgaactgagcgacagtcagctggatgcgctggcgcacgcgctgctcgatatcccgcggctgtcctatcgtactcgcggtctggtggatgacaacaagcatcatggcgcgctgtttcgctttaaggtcttccatcgcgatggggaaaggtgcgaacgctgtgggggaatcattgagaagacgacgctctcctcgcggccattttactggtgtccaggatgccagcattaagccggctggcgggcgatttcagcatgaagcgcgttatcaggcataaaaaacgcgccagcaggcgcgttttttatgatccggacagtgagattaacgcttaatgtcggactggaaatcgcgtttggcgtagccggtatacagctgacgcggacgggcgatcttcatgccatcgctgtgcatttcgttccagtgcgcaatccagcccacggtacgcgccatggcgaagataacggtaaacatggaggacggaatacccatcgctttcaggatgataccggagtagaagtcgacgttcggatacagtttcttctcgatgaagtacgggtcgttcagcgcgatatgctccagctccatggccacctgcagcaggtcgtctttggtgcccagctctttcagcacttcatggcaggtttcacgcatcacggtggcgcgcggatcgtagtttttgtaaacacgatggccgaagcccatcaggcggaaagagtcattcttgtctttcgcacgacgaacaaattccggaatgtgctcaacggagctgatctcttccagcattttcagcgccgcttcgttggcgccaccgtgtgccggtccccacagggaggcgatgcccgcagcgatacaggcgaacgggttagcgccggaggagcctgcggtacgtaccgtggaggtcgacgcgttctgctcgtgatcggcgtgcaggatcagaatacgatccatcgcgcgctccagcaccggattgacttcatactcttcgcacggtgtcgcaaacatcatgcgcaggaagttgccggcgtaggagaggtcgttgcgcggataaacaaacggctggccgatagaatacttgtaacacatggctgccatggttggcattttggacagcagacggtaggcggcaatctcgcggtgacgcgggttattcacgtcgagggaatcatgatagaacgccgccagcgcgccggtgatcccgcacatcaccgccatcgggtgggaatcgcgacggaacgcgtggaacagacgggtgatctgctcatgaatcatggtgtggcgggtgacggtagttttgaattcgtcatattcggcctgggtcggcttttcgccgtacagcaggatataacagacttcaagataattagattcggtcgctaactggtcgatcgggaagccgcggtgcagcaggatcccctcgtcaccatcgataaacgtaattttagattcacaagaagccgttgatgtgaaacctgggtcaaaggtaaatacgccttttgaaccaagactacgaatatcaataacatcctgaccgagcgtgccttttagcacatccagttcaatagcagtgtcaccacccagggtgatttttgctttagcatcagacatttatggtctccttagcgcctttattgcttaagactgccgggtggtggatttgctttcggcccgcgcctgcatacgttaccagtttgttatgttgcacacagctctgcgtcagcgaaaagggcagggtacagagcaacggcgcttgatggcacgtccttcagggctgcggtgaaacaacagcaaatcagcgttttagcagtccgaatattaaaacctatataccactaataactgtcctgattacatcggtcaatactgacacactgttacataacttattctcaggtgaaagagtgaccccataacttttgagcattattgcatttaactggtaatggttgtaacaagaatgtttaatatttgtcaaatcaggtgattaaaaattaaaaaaatgttggtatcgtgaccttgatcactgttccggagaaaacccaacaaactatatgtaggttaattgtaatgattttgtgaacggcctatactgcggccaggtctccggaacaccctgcaatcccgagccacccagcgttgtttagtgatgttttaatgcctgaaaagacgttttaacatgacttctggttatagaaaggacgctgtctgacccgcaagcagaccggaggaaggaaacaataagaacagcatgtgggcgttattcatggtaagaaatgtgaaaaaacaaagacctgtcaatctggatctacaaacgatacggttcccaatcacggcgatagcgtccattctccatcgcgtttccggtgtcatcaccttcgtggcggtcggaattctgctttggctgctgggcaccagcctttcctccccagaaggttttctgacggcggcctccatcatggatagcttctttgtgaagttcatcatgtggggcattctcaccgcgctggcctatcacgtcgttgtcggtattcgccatctgatgatggactttggctaccttgacgaaaccctcgaagcagggaaacgttccgccaaaatttcttttgttattactgtcgtgctttcacttctcgcaggagtcctcgtatggtaagcaacgcctcagcactgggacgcaacggcgtacatgactttatcctggtccgtgctaccgccatcgttctgaccctctacatcatctacatggttggcttcttcgccaccaccggtgaaatctcatgggaagtgtggaccggattctttgcctccggcttcactaaagtcttcactctgctggctctcgtttccattctcatccatgcctggatcgggatgtggcaggtgttaacagactacgttaaaccactggctctgcgcctggttctgcaactggctatcgttgtggcgctggtggcttacgttctttatggatttgttgtggtgtggggtgtgtaatgaaattgccagtcagagagtttgatgctgttgtcatcggtgccggcggcgcaggtatgcgcgcggcgctgcaaatttcccagagcggacagacttgtgcactgctctccaaagtgttccctacccgttcccataccgtatccgcgcagggtggcatcaccgtcgcgctcggtaactcccatgaagataactgggaatggcatatgtacgacaccgtaaaagggtcggactatatcggcgaccaggacgccatcgaatacatgtgtaagaccggcccggaagcgattcttgagctggagcacatgggactgccgttctctcgtcttgacgatggccgtatttatcagcgcccgtttggcggccagtcgaagaacttcggcggcgaacaggcggcgcgtaccgcggcggcggctgaccgtaccggtcacgccctgctgcacactctgtatcagcagaacctgaaaaaccacaccactatcttctccgaatggtacgccctcgatctggtgaaaaaccaggacggcgcggtagtcggttgtaccgccctgtgcatcgagaccggcgaagtggtctactttaaagcccgcgccaccgtgctggcgaccggcggcgcaggccgtatctatcagtccaccaccaacgcccacatcaatacgggtgacggcgtcgggatggccatccgcgccggcgtgccggtgcaggatatggaaatgtggcagttccacccgaccggtatcgccggggctggggttctggttaccgaaggttgccgcggcgaaggcggttacctgctgaacaaacacggcgaacgctttatggagcgttatgccccgaacgctaaagacctggcgggccgtgacgtggtggcgcgttccatcatgatcgaaatccgcgaaggccgcggttgcgacggtccgtggggcccgcacgcgaaactgaaactggatcacctcggtaaagaggttctggaatctcgtctgccgggtatccttgaactttcccgtacctttgcccacgtcgatccggtgaaagagccgatcccggttatcccaacctgtcactacatgatgggcggtatcccgaccaaagtcaccggccaggcgttgaccgtgaatgagaagggcgaagacgtggtgatcccgggcctgttcgcggtaggcgaaatcgcctgcgtatcggtccacggcgccaaccgtctgggcggcaactcgctgctcgacctggtggtcttcggccgcgcggcgggcctgcatctgcaggaatccattgccgagcagggcacgctgcgcgacgccagcgaatccgatatcgaaggctcgctggatcgcctcaaccgctggaacaacacccgctctggtgaagatccggtggcgattcgtaaagcgctgcaggaatgtatgcagcataacttctcggtgttccgcgaaggcgatgcgatgcacaaaggtctggagcaactgaaagtgatccgcgagcgcctgaaaaacgcccgtatcgacgatacctccagcgagttcaacacccagcgcgttgagtgcctggagctggataacctgatggaaaccgcctacgcgaccgccgtatccgctaacttccgtaccgagagccgtggcgcccacagccgcttcgacttcccggatcgtgatgatgaaaactggctgtgccattccctgtacctgccagagtcggaatccatgacgcgtcgtagcgtcaatatggaaccgaaactgcgtccggcattcccgccgaagattcgtacttactaatgcggagacaggaaaatgaaactcgagttttcaatttatcgctataacccggatgttgacgacgctccgcacatgcaggattacacccttgaagcggaagaaggtcgcgacatgatgctgctggatgcgctgatccagctgaaagaaaaagatccgtcgctgtcgttccgccgctcctgccgtgaaggggtctgcgggtccgatggtctgaacatgaacgggaaaaacggtttggcgtgcatcacgccaatctccgcgctgaatcagccgggcaagaagattgttatccgtccgctgccaggattaccggttatccgtgatttggtggtggacatggggcaattctatgcacaatatgagaagattaagccttacttgttgaataatgggcaaaatcctccggctcgcgagcatctgcagatgcctgagcagcgtgagaaactcgacgggctgtacgagtgtattctgtgcgcctgctgttcgacctcgtgcccgtcgttctggtggaacccggacaagttcatcggcccggctggcctgctggccgcgtatcgcttcctgatcgacagtcgcgataccgaaaccagcgagcgcctggacggcctgagcgatgctttcagcgtattccgctgtcacagcattatgaactgcgtcagtgtgtgtccgaaggggctgaacccgacgcgcgccatcggccatattaagtcgatgctgctgcagcgcagcgcgtaagcaacacggtctgtcccggatggcgctagcgcttatccgggctaccaaagcagtagccccggcaagcgttagcgccgccgggggatatagcaggaaatctttaaaaaccgccacaagatgtaccagtaatcgaggcgttcagtgcgaggtaaggcggcaactgagcgcatccccgggagcatagtgaactatgtgaccggggtaagcgaaggcagccaacgcaaccgcagcctgaacgctgaagattaatggcagtttttaaaggttccttagcggatagaaaccacaactcgtccgcaacaagtgaaccccggcacgtgcactcggtgtgcgtggtagtttctacggcgaaataagcatatgaatgcttaagggatcacgatgcagaacggcgcaatgaaagcctggctggactcttcttacctctctggttcgaaccagagctggatagaacagctctatgaagacttcttaaccgatcctgactctgttgacgccaactggcgttcaatgttccagcagttacctggcaccggagttaaaccggatcaatttcattccaaaacgcgtgattatttccgtcgactggcgaaggatgcctcacgttacacttcttcgatttccgacccagacactaatgtgaagcaggttaaagtcctgcagctcatcaacgcataccgtttccgtggccaccagcatgcgaatctcgatccgctggggctgtggaagcaagagagagtggcggatctcgatccggcctaccacgatctgaccgaggccgatttccaggaaagctataacgtaggttcatttgccatcggtaaagacacgatgaagctgggcgagctgattgtcgccctcaagcaaacctactgcggctccatcggcgcggaatacatgcatatcacctctaccgaagaaaaacgctggatccagcagcgcattgaatcggtagctggcaaagcgagctttaccccggaagagaaaaaacgcttcctcagcgaactgaccgccgcggaaggtctggagcgctacctcggcgccaaattcccgggggcgaagcgcttctcgctggagggtggcgacgccctgatcccgatgctcaaagagatgatccgccatgcaggcaaaagcggcacccgcgaagtggtgctgggcatggcgcaccgcggccgtctgaacgtgctggtcaacgtgctgggtaaaaaaccgcaggacctgttcgacgagttcgcgggcaaacataaagaacacctcggcaccggcgacgtgaagtaccacatgggcttctcttccgatatggaaaccgaaggcggtctggtgcacctggcgctggcgtttaacccgtcgcacctcgagatcgtcagcccggtggttatcggttccgtacgcgcccgtctggatcgtctggacgagccaagcagcaacaaagttctgcctattaccatccacggcgacgccgccgtcaccggccagggcgtggttcaggaaactctgaacatgtccaaagcccgcggttacgaagtgggcggtaccgtgcgcatcgttatcaacaaccaagtgggcttcacgacctctaacccgctggatgcgcgctcgacgccgtactgcaccgacatcggtaaaatggtgcaggcgccgattttccacgtcaatgcggacgatccggaagcggtcgccttcgtcacccgtctggcgcttgatttccgcaatacctttaaacgcgatgtcttcattgatctggtgtgctaccgccgtcacggccacaacgaagccgatgagccgagcgcaacccagccgctgatgtatcagaagatcaaaaagcatccgactccgcgcaaaatctatgctgacaagctggagcaggagaaggtggcgactctggaagatgcgaccgagcaggttaacctctatcgcgatgcgctggatgccggcgaatgcgtggtgcaggaatggcgtccgatgaatatgcattcctttacctggtcgccgtacctcaaccacgagtgggacgagagctatccggataaagttgagccgaaacgtctgcaggagttggccaaacgcatcagcacggtaccggaaggtatcgaaatgcagtcccgcgtggcgaaaatttacgccgaccgccaggcgatggcggcaggcgagaagctgtttgactggggcggcgccgaaaacctggcctacgccacgctggttgacgaaggtattccggttcgtctgtccggcgaagactccggccgcggcaccttcttccaccgtcatgcggtgatccataaccagaccaatggttcaacctacacgccgctgcagcatgtccataacggccagggccagttccgcgtttgggactcggtactgtctgaagaagcggtgctggcgttcgaatatggctacgccaccgccgagccgcgcactctgaccatctgggaagcgcagtttggcgacttcgccaacggcgcgcaggtggtgatcgaccagttcatctcctccggtgagcagaaatggggaaggatgtgcggcctggtgatgctcctgccgcacggttacgaaggccagggcccggagcactcctccgcgcgtctggagcgttatctgcagctgtgcgctgaacaaaacatgcaggtctgcgtgccgtccacgccggcacaggtttatcacatgctgcgtcgccaggcgctgcgcggtatgcgtcgtccgctggtggtgatgtcgccgaagtcgctgctgcgtcatccgctggcggtctccagcatggatgagctggcgaacggcactttcctgccggctattggtgaaatcgatcaacttgatccgcaggctgtgaagcgcgttgtgctgtgctctggtaaggtttactacgacctgctggaacagcgccgcaaaaacgagcaaaaagatgtcgctatcgttcgtatcgagcagctctatccgttcccgcatcaggcggtgcaggaagcgctgaaagcgtatgcgcacgtgcatgattttgtctggtgccaggaagagccgctcaaccagggcgcatggtactgcagccagcatcacttccgtgaagtgattccgtttggggcctctctgcgttatgcaggccgcccggcctccgcctctccggcggtagggtatatgtccgttcaccagaaacagcaacaagatctggtcaatgacgcgctgaacgtcgattaattaaaggatacacaatgagtagcgtagatattctggttcccgacctgcctgagtccgtagctgacgcaaccgtcgccacctggcacaaaaaaccgggcgacgcggtcgtccgtgacgaagttctggtcgaaatcgaaactgacaaagtggtactggaagtaccggcatcagcggacggcattctggatgcagtgctggaagacgagggcgccaccgtcctgtctcgccagatccttggccgcctgcgcgaaggcaacagcgcaggtaaagaaagcagcgagaaagccgatgcgaaagcgtccactccggcgcagcgtcagcaggcctctctggaagagcagaacaacgacgcgctgagcccggcgatccgtcgtctgctggctgaacacaaccttgacccagcggccatcaaaggcactggcgtcggcggtcgtctgacccgcgaagacgttgagaaacatctggcgaaagccccggcgccggcagaagccaaagcgccagccgccgccccggcagccgcgccggcgccgcagctgggccaccgttcggaaaaacgcgtcccgatgacccgtctgcgtaaacgcgtagccgaacgtctgctggaagcgaaaaactctaccgccatgctgacgacctttaacgaagtcaacatgaagcccatcatggatctgcgtaagcagtacggtgaggcgttcgaaaaacgtcatggcatccgcctgggctttatgtccttctacgtgaaagcggtagtggaagcgctgaaacgctatccggaagtgaacgcttccatcgatggcgacgacgtggtgtaccacaactacttcgacgtcagcatggccgtatccactccgcgcggtctggtcaccccggtgctgcgtgacgtcgacctgctgggcatggcggatatcgaaaagaatatcaaagagctggcagtgaaaggccgcgacggcaagctgaccgtagacgacctgaccggcggtaacttcactattaccaacggcggcgtcttcggctccctgatgtccacgccgatcatcaacccaccgcagagcgctattctgggtatgcatgccattaaagaccgtccgatggcggtcaatggcaaggtagagatcctgccgatgatgtacctggcgctctcctatgaccaccgtctgatcgacggacgtgaatcggtaggcttcctggtggcgattaaagagctgctggaagatccgacccgtctgctgctggacgtgtagtcagcaagcgtattacctaccgtaggccggataacacgcgttagcgccgttatcaggcctacaggtttaaagataattacaccctgaaggatggactgaacacatgaacttacatgaatatcaggcaaaacaactttttgcccgctatggcttaccggcgccggtgggttatgcctgtactactccgcgtgaagcagaagaagccgcttcaaaaatcggcgcgggtccgtgggtagtgaaatgtcaggttcacgctggtggccgcggcaaagcgggcggtgtgaaagtagttaagagcaaagaagagatccgcgcatttgccgagcactggctgggcaaacgtctggtgacctatcaaacagatgcgaacggccagccggttaaccagatcctggttgaagcggcgaccgatattgacaaagagctgtacctgggcgcggttgttgaccgtagctcccgtcgcgtggtgttcatggcgtctaccgaaggcggcgtggaaatcgagaaagtggcggaagagaccccgcacctgatccacaagatcgccatcgatccgctggcgggcccgatgccttaccagggtcgtgaactggcgttcaaactgggtctggaaggtaaacaggttcagcagttcaccaagattttcatgggtctggcgaccattttccttgagcgcgacctggcgctgatcgagatcaacccgctggtgatcaccaagcagggcgacctgatctgcctcgacggcaaactgggcgctgacggcaacgcgctgttccgccagccggatctgcgcgaaatgcgcgatcagtctcaggaagacccacgtgaagcgcaggcggcgcagtgggaactgaactacgtcgcgctggacggcaacatcggctgcatggttaacggcgcaggcctggcgatgggtaccatggacatcgttaagctgcacggcggcgaaccggctaacttcctcgacgtaggcggcggcgcgaccaaagagcgcgtgaccgaagcgttcaaaatcatcctctctgacgacaacgttaaagcggtgctggttaacatcttcggcggcatcgtgcgttgcgacctgatcgctgacggcatcatcggcgcggtagcggaagtaggggttaacgttccggttgttgtacgtctggaaggtaacaacgccgaactgggcgcgaaaaaactggctgacagcggcctgaatattattgcagcgaaaagtctgacggacgcagcacagcaggttgttgccgcagtggaggggaaataatgtcagttttaatcaataaagataccaaggttatctgccagggcttcaccggtagccaggggaccttccactctgaacaagcgatcgcttacggtacgcaaatggttggcggcgtgacgccaggcaaaggcggcaccactcacctgggcctgccggtgttcaacaccgtgcgcgaagccgttgaagcgaccggcgcgaccgcgaccgtgatctacgttccggcgccgttctgcaaagattccatcctggaagcgatcgacgcgggcattaagcttatcatcaccatcaccgaaggtatcccaacgctggatatgctgaccgtgaaggtgaagctggacgaagcgggcgtgcgtatgatcggcccgaactgcccgggcgttatcactccgggcgagtgcaaaatcggcatcatgccgggtcacattcacaagccgggtaaagtgggcatcgtttcccgttccggcaccctgacctatgaagcggttaagcagaccaccgactacggcttcggccagtctacctgcgtcggtatcggcggcgacccgatcccgggctccaacttcatcgatatcctgaagatgttcgaggaagatccgcagaccgaagcgatcgtcatgatcggtgagatcggcggcagcgcggaagaagaagcggctgcttatattaaagatcatgtcactaagccggttgtcggctacatcgcgggcgttaccgcgccgaaaggcaagcgtatgggccacgcgggcgctatcatcgccggcggtaaaggtacagcggatgagaaattcgcagcgctggaagcggcgggtgtgaaaactgttcgcagcctggccgacatcggcgaagcgctgaaagctattatcaagtaaaccctctctgcttgtccgcaagcagaaatctgtccgatttcgacatggttggccaccgtcaggtggccttttttgtgaccgttatcccgtctcgtcagaaccgcagcgccaacaacgaattgattttctgcgaaaagccctatctatcatattgatttaatttattatttaataagtattttcgatgcgctgtactggctaaaaaatatatcccggctgtaccgttgggaaacaaaagcggcagcgaaaaagcgtggggcaggggataaggaagaagataaaatactgtgagcggtctaacattattcggaacggttccttttttttgttttttttccacgacgttaaataatattacctatgattctcatatctctctttttagtaactggaaaagccatagtttaaacacttaattaacattaagttcaccaatattctttattgggctacataattaacacatagagtaaaaattgatttatatcaatacttaatccttggaaaaatccctcaaaaaacgttaaattgtctcaagtcaaattggctgaattcagccatcttcactatatattgatcaccgtcgaaaaatgtaaaactggaacaataaaaacatatttattgtaaggttattgcggcgtaatatattggggaatcaattgggtttttcgttaacgtatttgtaaccttaccctggcatggttttaccttcgattgaaacctgctgtggacgggcgacaaataaatttgtattggggcatgcgtatgagccagagcttctcggttcattttcggagtcttcatgcgatgagcaaggagtcatgatgttagatatagtcgaactgtcgcgcttacagtttgccttgaccgcgatgtaccacttcctgtttgtgccgctaacgctcggtatggcgttcctgctggccatcatggaaacggtctacgtcctttccggcaaacagatttataaagatatgaccaaattctggggcaagttgtttggtatcaacttcgcgctgggtgtggcgaccggtctgaccatggagttccagttcgggactaactggtcgtattactcacactacgtgggcgatatctttggtgcgccgctggccattgaaggtctgatggccttcttcctcgaatccacctttgtaggtctgttcttcttcggttgggatcgtctgggcaaagttcagcacatggccgtcacctggctggttgcgctgggttccaacctctccgcgctgtggatccttgtcgccaacggctggatgcagaaccctatcgcatcggacttcaacttcgaaaccatgcgtatggagatggtcagcttctctgaactggtgctcaacccggtcgcccaggtgaaattcgttcacactgtggcgtcgggctatgtcaccggcgcgatgttcatcctggcgattagctcctggtacatgctgaaaggtcgcgacttcgcctttgccaagcgctcctttgccatcgcagccagcttcggtatggcggcgatcctctccgttattgtgctgggtgacgaatccggttacgaaatgggtgacgtgcagaaaaccaaactggcggctatcgaagcagagtgggaaacccagcctgcgccggcggccttcaccctgtttggtattcccgatcagaatgcgcagaccaaccactttgcgatccagatcccctacgcgctgggcatcattgctacccgctcggtggacaagccggttatcggcctcaaggatctgatggttcagcacgaagagcgtatccgtaacggcatgaaagcctacgcgctgctggaacagctgcgcgccggttcaaccgatcaggccgtgcgcgaccagttcaataacgtgaagaaggacctcggttatggcctgctgttgaagcgctataccccgaacgtcgctgacgccacggaagagcagatcgccaaagcgaccaaagattccattccaagcgtcgcaccgctgtacttcgccttccgtatcatggtggcgtgcggcatcctgatgctgctgattataggcgcctccttctggagcgtgatccgtaaccgcatcggcgagaaaaaatggctgctgcgcgccgcattctacggcctgccgctgccgtggattgccgtggagtcgggctggtttgttgccgaatacggccgtcagccgtgggcgattggtgaggtcctgccgacggcggtggctaactcatcattgaccgcgggcgacctgatcttctcaatgttgctgatctgtggtctgtacacgctgttcctggtggctgaactgttcctgatgttcaagtttgcccgcaaaggacctagcagcctgaaaaccggccgctatcactttgaacagtcctctgcggctattcagtcggcacgctaagacaggagtcgtcaaatgatcgattatgaagtattgcgttttatctggtggctgctgattggcattctgctgattggttttgccgtcgccgacgggttcgacatgggggtgggcatgctcacccgcttcctcggccgcaacgacaccgagcgtcggattatgatcaacgccatcgccccgcactgggacggtaaccaggtgtggctgatcaccgccggcggcgcgctgttcgctgcctggccgatggtttacgccgcggcgttctctggcttctatgtggcgatgattctggtgctggcctcgctgttcttccgtccggtcggttttgactaccgttccaagatcgaggacacccgctggcgcaacatgtgggactggggcatcttcatcggtagcttcgtgccgccgctggtgattggcgtggcctttggcaacctgctgcagggcgtgccgttccacgtcgatgaatacctgcgtctgttctataccggtaacttcttccagttgctgaacccgtttggtctgctggccggtatcgtcagcgtggcgatgatcctgactcagggcgccacctatctgcagatgcgtaccgtaggcgaactgcacctgcgtactcgcaccgtttccatggtggcggcgctggtgacgctggtctgcttcgcgctggcgggcgtgtgggtctactacggcatcgacggctatgtggtgaaatcggtgattgaccataccggcccgtctaacccgctgaccaaggaagtggtgcgggaagctggcgcgtggatggtgaactttaacaatatgccagcgctgtgggcggtgcctgccctgggcgtggtgttgccgctgctgaccgtcgtttcgaccaaagcggataaaggtgcctgggcattcctgttctcctcgctgaccctggcctgcatcattctgactgccggtatcgcgatgttcccgttcatcatgccgtccagcaccatgctgaacgccagcctgacaatgtgggacgcgacctccagtcagcggacgctgaacctgatgacctacgtggcgattgttttcgtgccgatcattctggcctacaccagctggtgttactggaagatgtttggccgcataacgcgcgaagacatcgaaaagaatacccactcgctgtactaaggtaaggagctatatatgtggtacttcgcatggattttgggaacgcttcttgcctgtgcttttggggtcattaccgcgctggcgcttgagcacgtggaagccaccaaagccgggaagaaagaagaaatctgatgaaatttatcgctactctgtacgcgataatggacaagcgcccgctccgggcgctttccttattgatggcgctgctgctggctggctgcattttctgggatccgtcgcgctttgcggcgaagaccagcgagctggaaatctggcatggtttcttgctgatgtgggcggtttgcagcggcgttattcacggcgtgggctttcgcccgcgtgccgttcactggcaggggattttttgtccgcttatcgctgatatcgtgctcgctttaggtctcttctttttcttcttttgaataagagatctctgttaatgctatgggcttgcataagcccataaaaatttacgccccgtttactttcccccattccaaagcacctttcccgcgcgtatagtagcgaagtttgaaagctctaacctttttttgcattaccgggatgtaaagtgaatacaacgctgtttcgatggccggttcgggtctactacgaagataccgatgccggtggtgtggtttaccacgccagttacgtcgctttttatgaaagagcacgcacagagatgctgcgccaccatcactttagtcaacaggtgctgttggctgaacgcgttgccttcgtggttcgcaaaatgacgctggagtattttgcccccgccagactcgacgacatgctcgaagtccagacggaaattacctcgatgcgcggcacctctttggttttcacgcagcgaatcgtcaacgccgagaatacagtgttaaacgaagctgaggttctcattgtgtgcgttgatccactcttaatgaagccacgtgcgcttcccaagtctattgtcgcggagtttaagcagtgactgacatgaatatccttgatttgttcctgaaggcgagccttctggtaaaacttatcatgttgattttgattggtttttctatcgcttcctgggctatcattattcagagaacgcgtatccttaactcggccgcgcgtgaagctgaagcgttcgaggacaaattctggtccgggatcgagctctctcgtctgtaccaggagagccaggggcgtcgcgataacctgaccggttcggaacaaatcttctacagcggtttcaaagagtttgcacgcctgcatcgggctaacagccatgcgccggaagcgattgtcgaaggggcatcgcgcgcgatgcgtatttcgatgaaccgcgaactggaaacgctggagacccatattccgttcctcggcaccgtaggctcgatcagcccgtatatcggtctgttcggtaccgtctgggggattatgcacgcctttatcgcccttggcgcggtgaagcaggccaccctgcagatggtggcgccaggtatcgccgaagcgctgatcgccaccgcgattggtctgttcgccgcaatcccggcggtcatggcgtataaccgcctgaaccagcgcgtgaacaagcttgaactgaattacgacaactttatggaagagttcaccgctattctgcaccgtcaggcctttaccaccagcgaaagcaataaggggtaagccatggccagagcacgtggacgcggacgtcgcgaactgaagtccgagatcaacatcgttccgctgctggatgtcctgctggtgctgctgctgatctttatggcaacggcgccgatcattacgcagagcgtggaagtcgatctgccggacgccacggaatcgcaagcggtgaaaagcaatgacgatccgccggtgattgtggaagtctccggggtagggcagtacagcgtgaaggtggggcaggagacgctgtcccagctgccgccggagcaggtaattgccgaagcgaagcgtcgtcttgaagccaatgaaaaaacggtattcctgatcggcggtgcgaaagacgtcccttacgatgaaattattaaagcgctgaacctgttgcatagtgcaggggttaaatcggtcggcttgatgaccaaacctatttaatcgcttcaggtaggtgcgtccgcgcggcgtccggtggcgggtatcgctcgtcgtcggtgcgcatcgcggatacaggcgaacagcttttgggaaccgatagtgtcaaaggcaaccgaacaaaacgacaagcttaaacgagcgatcatcatttcagtcgcgctgcacatcattctgatcgcgctgctgatctggagttcgtttgacgagcatctggatgcctctgccggcggcggcggatcgtcgattgatgccgtcatggtcgatccgggggcggtggtaaataactataaccgtcagcaacagcagcaggccagcgcacgtcgcgccgctgaacagcgtgaaaaacaggcgcagcagcaggcggaagagttacgtgagaaacaggcggcggaacaggaacggctgaaacagctcgaacaggagcggctgcaggcgcaggaagcggcgaaagaagcgaaggagcagcagaagcaggctgaagaagcggctgccaaggccgccgcggcggcaaaagccaaagcggacgcacaggcaaaagaagcgcaggaagccgctgccaaagcggccgccgaggcgaaagcgaaggcggatgcccaggcgaaagcggcagaacaggcggcggccaaggcggctgctgacgcgaagaagcaggccgaagccgctgcagcgaaagccgctgccgaggcgaagaaacaggcggaagctgaagcggcgaaagctgcggccgaggcgcagaagaaagcggaagcggcggctgcgaagaaagcgcaacaggaagcggagaaaaaagcccagcaggaagcggctaagcaggcggcagctgaaaaagcggctgccgaaaaagccgctgagaaagcagccgcgcaaaaagcggccgctgagaaggccgccgccgagaaagccgcagccgctgaaaaagcggcggcagcgaaagcggctgcagcagagaaggctgcagctgataaagcggccaaggcggcagcagcaaaagccgcggcggcgaagaaagcggcggctgcgaaagaagcggacggcgttgacaacctgctcggcgatctgagttctggtaagaatgcgcctaaaacaggcggtggggccaaaggaaacaatgcctccgctgccgggagtggtaatactaaaaacagtgcctcaggggctgatatcaacaactatgccggacagataaaatcggcgattgaaagtaagttttatgacgcatcgtcctatgcgggcaaaacatgtaccttgcgtatcaaacttgctcctgacggtctgttgttaaatatacagtccgaaggtggtgatcctgctctgtgccaggccgctcttgccgcagcccgacaggctaagtttccgaaaccacctagccaggcagtatatgaagtcttcaaaaatgcgccactggacttcaaacctcagtgacatttttccccgtgcaaacggggaaaaacaatctatggtagtcacagggttttggtagttttgtatatttgagtttgttaacattctgctaaattatcgtgggctttccgcccggataagggagatatgatgaagcaggcattacgagtagcatttggttttttaatgctgtgggcggcggtgctgcacgcagaagtacgtatcgagatcacccagggggtggactcggcgcgccctatcggcgtggtaccgttccagtgggccggccagggcgctgcgccggaagatgtcggtggtatcgtggcagctgacctgcgcaacagcggtaaattcaatccgctggatcgctctcgtctgccgcagcagccgactagtgcccaggaagtgcagcctgctgcctggtctgcgctgggtattgacgccgtagtcgtcggccaggtcacgcaaaatccggatggttcttatcaggttgcgtatcaactggtggacaccggcggagcgccgggcacaacgctggcgcaaggttcttttaaagtcactaagcagtacctgcgctatgcggcgcacgcggccagcgacgcggtatttgagaagctgaccggcatcaagggcgccttccgtacccgtatcgcctacgtggtgcagaaaaacggcggccagtacccttacgaactgcgcgtgtccgactacgatggttacaaccagttcctggttcaccgttcctcccagccgctgatgtccccggcctggtctccggacggttctaaactggcctacgttacctttgaaagcggtcgttctgcgctggtggttcagaccctggcgaacgcctctgtgcgtcagatcgcctccttcccgcagcacaacggcgccccggcgttctcaccggatggttctaaactggcgttcgcgctgtcgaaaaccggtagcctgaacctgtacgtaatggatctgggatcgggtcagattcgtcaggtgaccaacggtcgcagcaacaacaccgaaccaagctggttcccggacagccagaatctggccttcacttctgaccaggcaggtcgtccgcaggtatataaagtcaacattaatggcggcacgccgcagcgtatcacctgggaaggttctcagaaccaggacgccgacgtgagcgcggatggtaaaaccatggtaatggtcagctcggccggcggtcagcagcacattgccaaacaagatctggaaacgggtggtgtacaggttctgtcatcaacgtttttagacgaaacgccaagtctggcacctaacggcactatggtaatctacagctcttctcaggggatgggatccgtgctgaatctggtttctacagatgggcgtttcaaagcgcgtcttccggcaactgatggacaggtaaaatcgcctgcctggtcgccgtatctgtgataataaataattgattattaaaggaatcaaagaaatgcaactgaacaaagtgctgaaagggctgatgatcgctctgccggttatggcaatcgcggcatgttcttctaacaagaacgccagcaacgaccagagcggtgaaggcatgctgggtgccggcactggtatggacgctaacggtaacggcggcaacatgtcttctgaagagcaagctcgtctgcagatgcagcagctgcagcagaacaacatcgtttacttcgatctcgacaagtacgatatccgttctgacttcgctgctatgctggacgcgcacgctaacttcctgcgcagcaacccgtcctacaaagtgactgtagaaggtcacgcggatgagcgcggtacgccggaatacaacatcgctctgggtgagcgtcgtgctaacgccgttaagatgtatctgcagggcaaaggtgtttctgccgatcagatctccatcgtttcttacggtaaagaaaaaccagcagtactgggtcatgacgaagcggcatatgccaaaaaccgtcgcgccgtactggtttactaagagaattgcatgagcagtaacttcagacatcatttattgagtctgtcgttactggttggcatagcggccccctgggccgcttttgctcaggcgccaatcagtagtgtcggctcaggctcggtcgaagaccgcgtcactcaactcgagcgtatttccaatgctcacagccagcttttaacccaactccagcaacaactctctgataaccagactgacattgattctctccgcgggcagatccaggagaaccagtaccagctgaatcagatcgttgagcgccagaaacagattctgctgcagatagatagtttgagcagcggtggcggcgcagcatcaggtgcgcaggctccgtcgtcttctggcgatcagagcgcggctgccaccagcgcagcgccagcggccacctcaggcgccccggcgatgaccggcgatgcgaacaccgattataatgccgctattgccctggtgaaggatgcctcacgccaggatgacgcgatggtggcgtttcaaaacttcgtcaaaaagtacccggattcaacctaccagccaaacgctaactactggctcgggcagttgaactacaataaggggagaaaagacgacgcggcgttttacttcgcttcggtggtgaagaactacccgaaatcgccaaaagcgcctgacgcgatgtttaaagtcggcgtgatcatgcaggacaaaggtgataccgcgaaagcgaaagcggtttaccagcaggtgatcaataaattccccggcaccgacggtgcgaaacaagcgcaaaaacgacttaatgctcttggttgattacggcatgaccagaaatcgcgttatttctggtcttgtcgcctgaatcgccagcagttaagtgatctttatcgaaattttagttgcgctgaattctgaaatcagtaatatatgccgccgttgccaagggatatcaaacaagcccaaagcaatgccagagtgggtcgttagctcagttggtagagcagttgacttttaatcaattggtcgcaggttcgaatcctgcacgacccaccaatcgttctggtggaacgcgatagtaaaacgtgaaggataacgttgcgtcagcaacggcccgtagggcgaggcgaagccgagtcatcctgcacgacccaccgcttagtagtatccagcgtagtatcgggtgattagctcagctgggagagcacctcccttacaaggagggggtcggcggttcgatcccgtcatcacccaccaccgggtcgttagctcagttggtagagcagttgacttttaatcaattggtcgcaggttcgaatcctgcacgacccaccatctttaacatcgaacgtcggtgttaaacgtgaaggataacgttgcttcagctacggcccgaagggcgagcgaagcgagtcatcctgcactccaatcatttttatgatggggtaggtggacgcagtatcggtagtatccagcgcagtttcgggtgattagctcagctgggagagcacctcccttacaaggagggggtcggcggttcgatcccgtcatcacccaccactcgggtcgttagctcagttggtagagcagttgacttttaatcaattggtcgcaggttcgaatcctgcacgacccaccaatttcagtatttaactcagatgctgaacgtgaaggataacgttgcgacagcaacggcccgaagggcgaggcgaagtcgagtcatcctgcacgacccaccatcctgaatgatggcagcagtaaaatcccgcaaggggtcgttagctcagttggtagagcagttgacttttaatcaattggtcgcaggttcgaatcctgcacgacccaccaatgtaaaaaggcgccctaaaggcgcctttttgctatctgcatttccctgccactcatcaatgttaataatttcttaattcatcattttcccacggtcacgctgcgcttaccgtgcctgcacaggatacgaaccggtcgttcgggcagatgcgcagcaccgtccccgggaaaagggtctgatgtacaaaattcatcacgacttttagctcgtaatcggctatcttgtttagcatataaaacaccatgaccgtgttaagccgccgacaggccatactgacggttgtagagttaagccagtaaaacgagattgcatgatgagcgtaatgtttgatcctgaaacggcgatttatcctttccctgctaaaccgcagccgctgaccgtcgacgaaaagcagttttaccgcgaaaaaatcaagcgcctgctgcgcgagcgcgatgccgtgatggtggcgcattactacaccgatcctgaaattcaacagctggcggaagagaccggcggctgtatcgccgactcgctggagatggcgcgctttggcgcccgccattcggcctccacgctgctggtcgccggagtgcgttttatgggggaaacagccaaaatcctcagcccggaaaagaccattttgatgccgaccctgaacgccgagtgttcattggatctgggctgtccgattgaggaattcaacgccttttgcgacgcccatcctgaccgcaccgtcgtggtctatgccaatacgtccgccgcggtgaaggcccgcgccgactgggtggtgacctccagcatcgccgtggaactcattgaccatctggatagtcttggtcaaaagatcctctgggcgccggaccgccaccttgggcgttacgttcagcgtcagaccggcgcagacgtgctgtgctggcagggggcgtgcatcgtgcacgacgagtttaaaacccaggcgttgatgcggatgaaggctctgcatcccgaagccgccgtgctggtccatcccgagtcgccgcaggcgatcgttgagatggccgatgccgtaggctccaccagccagctgattgcggcggcgaaaagcctgccccagcgccagctgatcgtggccaccgatcgcggtattttctataaaatgcagcaggcggtgccggagaaaacgctgctggaagcgcccaccgccggcgaaggagcgacctgtcgcagctgcgcgcattgtccgtggatggcgatgaatggcctgaaagccattgccgagggtctcgagcagggcggcgctgaacatgaaatccatgtcgacgaagcgctgcgaaccggcgcattaattccccttaaccggatgctggattttgcggctacactacggggataacctattgtcgcgtcgccagacgctgaggggaggaaatggatttttttagcacgcagaatattttagtacatatacccatcggcgctggggggtacgatctctcctggatagaggccgtggggacgattgccgggctgttgtgtatctggctggcgagcctggagaagatcagtaactatgctttcgggctggtcaacgtcacgctgttcgccatcatcttctttcagatccagctgtacgccagcctgctgctgcaactgttcttttttgccgctaacgtttacggctggtatgcatggtcgcgacaaagcagcaaccatgaggctgagctgcagatccgctggctgccgcgcagcaaagcgctgggctggctggcggcctgcgtggtagcgatcggcttgctgaccctttttatcaacccgttctttgctttcctgacgcggatcgcggtcagcctgatgcaagcgctcggtttgcaggtcactatgccggaactgcagccggatgctttcccgttctgggactcctgtatgacggtgctgtcggtggtggcgatgatcttaatgacccgcaagtatgttgaaaactggctgctgtgggtgatcgtcaacgtgataagcgtggtgatttttgcccgtcagggcgtctatgccatgtcgctggaatacctcttgctgacgttcattgcgttgaacggcagccggatgtggataaacagcgcgcgtgagcgaggttctcacgcgttttctggctaatggtggtggtgatgatcgtgcccggcgtgcatcgtgttgagatggcactccgggccgctgcagggctggtactccatctgcaccgtggcatgcgcaatttcatatttatgttccaggaaatgcaggatgcggttgagtaacgcgtcatgatcgtgcggtggaacgacctgtacatggagcgtcatcaccggtttttcccccaccagccagacgtggacgtggtgaacatcgcgtacctccgggatagagcgacggatatcccgctgcagggccgccacatccagcgaacgcggcgcgccttccagcaattcattcagactctctttcagtaatcgccaggcactacgtaataccaggcaggaaaccagcacggaaagaatcgggtcgacaggcgtccagccggtggtgaggatcaccacggccgccacgatcgcgccgaccgagcccagcaggtcgccaagcacgtgtagcgctgcggcgcgtacgttaagattccgctcctcgctaccccgatgtaggatccaaaacgccagcacgttggccagcagaccggcgactgcaatgaccatcatcgtcacgccggctaccggctgcggatgctggaagcgctgaatcgcctcccagacaatcagcatggtgatcaccaccagagcaatagcattgagaaacgccgccagggtggttaaacgcaaccagccaaaggtatggcgggcatttggtgggcggctggcgaagcgaaccgccagcagcgcaaacagcagagcggcggagtcggtgagcatatggccggcatccgccagcagggccagcgagccggagatcgcgccgccgacggcttcaatcagcataaagccggcggtgacgataaacgcccatagcagccggcgggcgttgctgttatccggagcctggacagaggagtgcgaatgcgagtgcgccatagtgtcgtcccttaatacttatcattattacgctatgacatcataaacagagagcgataaaaaacgaagaaaaggcgagaccggctcgccttttcttcgatctgcccacctcatgtgttactgggtggtgccgtcggttttgctgttgtcttgggtcgtattgccgccgttgtccagttttttaccggtgtccggacagcggccgtctttacacatcgagtttttatgtacctcatcgctcgacatattatcctgggtcatcgtcgagcccgtggtgcccccagagccagagttgatctgactattgtccacgttgttcggcgccacgttctcacgggcatccggcgccacctgaccggcatccgcggaagagttggcctggccattattggactgggcgccggtgtctgccgccagggccgcgccgctggcaagacctaaggtggcggtgagcaaaagggtcgtcagttttttcatattcatcggatactcctgttaagccgggaaggggaaatgcgcttcccgcggtgagtgtgccagggatctgactcgctatggtttaagactccgcagacgatcgcagtgtcactatataatcctgaaacgtaagacttaattagctttaacagttaaatattgtagttcatgagcctggtttcgctactttatggcgtatttttgcctatttccaggattattccatcactactgtaaaatcacgtttacactatttcagcgaagagatagattggagggattgcatttcattgaataagtatggccacgctggaaataagatgaattatcagaacgacgatttacgcattaaagagatcaacgaattattacctcccgttgcgctcctggaaaaattccctgctaccgaaaatgctgcaaacaccgttgcacatgctcgcaaagcgatccatcagatcctcaaaggcgacgatgaccgtctgctggtggtgattgggccttgttctattcacgatccggcagcggcgaaagagtatgccgcccgcctgctgaccctgcgcgaggcgctgaagggcgagctcgagatcgtcatgcgggtctattttgaaaaaccgcgcaccaccgtcggctggaaagggctcatcaacgatccccatatggataacagcttccgcatcaacgacgggttgcgcatcgcgcgcaaactgctgctggacattaacgacagcggcctgccggcggcgggggaattcctcgatatgatcaccccgcagtatgtcgccgatctgatgagctggggcgccattggcgcgcgaaccaccgaatcccaggtgcaccgtgagctcgcctccggactctcctgcccggtgggctttaaaaacggtaccgatggcaccatcaaggtggctatcgatgcgattaacgccgccggcgcgccgcactgtttcctgtcggtcaccaagtggggccactccgccatcgtgaataccagcggtaacggcgactgtcatattattttgcgcggcggcaaagagcctaactacagcgcgaagcacgtggcggaggtgaaaatcggtctggcgaaagcgggtcttccggcccaggtgatgatcgacttcagccatgccaactccagcaagcagttcaagaagcagatggaagtgggcgccgacgtatgccagcagatcgccggcggcgagcgcgccattatgggcgtgatgattgaaagccatctggtggaaggcaaccagagcctcgagagcggtgaaccgctgacctacggcaagagcgtcaccgacgcctgcatcggctgggaggataccgaaacgatcctgcgtcagctggcggaagcggtgaaaacccgccgcggctaagctactccgcgctagcgcaggtcataaaaaaagcgtggagatttccacgcttttttgttctcaccaggagaaattacttcgctttaccctggttggcgacggcagccgctttcgccgcgatctcttccgcgttgcccagatagtaatgtttgatcggcttgaagttttcatcgaactcatataccagcggtacgccggtcgggatgttcagttcgaggatctcgtcttcgcccatgttgtcgaggtatttcaccagcgcgcgcagggagttaccgtgagcggcgatgatcacgcgctcaccgcttttcaggcgcggcagaatggtttcgttccagtaaggcacgacgcggtcgatagtcagcgccaggctttcagtggtcggcagttcggcgtcggtcagttttgcatagcgcggatcgtggcccgggtagcgctcgtcgtctttggtcagctccggcggagtgacagcgaagccgcgacgccactgtttaacctgctcgtcaccatatttctcagcggtttccgctttgttcaggccctgcagcgcgccgtaatgacgctcgttcagcttccaggatttctcaaccggcagccaggcctgatccagttcgtccagcacgttccacagggtgtggatggcacgtttcagcacggaggtataagcaaaatcaaagctgaagccttcagccttcagcagtttacccgctgcttttgcttcgctaacgcctttctcggacagatccacgtcgtaccaaccggtgaagcggttttcgttgttccactggctttcgccatgacgaaccagtaccagcttagttacagccattctctcactcctctctacacgccatccctcgcgccgcgaacggtgcgctgaatgtgatggtgtatgtgttattgattgataactattctcattatattgccgtgatttggcgcacggcaatgcttatccctaaccatagcgaaaatagtggcgcagtgtaaggtgcttgtaatacacaggttatttttttgtcctttggtgacggaaaatagagcaggttgctgaaaaaagaggcggcagagaggagggcggggacgaaaagcagcgccccctgatggagggcgctggcgattatcgggcgataaactgatattccgtcaggctgacgtactcctggcccggacgtaatacacagtccggctgcggccattgcggatggttcggcgaatccggcaggaattcgctctccagcgccagtccctgccagtcggcgtagggctccgtcgtctgcgacggggtgccgccgagatagttgccggagtaaaactgcagcgccggagcggaggtatagaccgtcatctgcagcttgccatcctgcgaccagacctgtgccgcaggctggctggcgtcgcctttggcatccagcaggaaggcatgatcgtatcccttcaccttttgctgatcggcatccgcgaggaagtcggcggcgatggttttcggctggcggaaatcaaagctggtgttagcaacatctttcagttcgccacccgggataccgtcgctttccaccggcagatacctctgggcgaggatctggagctgatgctggcgcacatcgccctgctcaccgtcgaggttgaaatagacgtgattggtcatattcaccgggcagggttggtccacggtggcgcgataggtaatcgcgatgcggttatcgtcggtcagacgatagtgcgcggtggcctgcagggtgcccggaaagccttgatcgccatcgggcgaggtcagggcgaacagcacttcctgctcgtcggcgcggacaatgcgccagcggcgcttatcaaacccttccgggccgccgtggagctggtggcccgcgtcgtttgacggcgtgacgttgacgacctggccgtcaagcgggaagcggctgtggccgatacggttggcgtagcggcctaccgaggcgccaagaaatgcggcctggcgagcatagtcttccagctttgcgcagcccagcagcggtcggcgcaggctgccatcggccagcggcacctcggcgctgagcagcgtcgcgccccagtccgccacggtgacggtcatccccgacttattgcgcagggtcacctgctgccatggccggccgtccggggccagcgcggtggtttgcgttagcattgcccggccccctgtgacggtttgcagacatagaatgtctctttaataccggttttcgcttcatactcgttggcaacggcctgctgaacggtatcgaccagatcttccgggattaacgctaccacgcagccgccaaagccgccgccggtcatgcgcacgccgcccttatcgccgatcgcggccttaacgatctccaccagggtgtcgatctgcgggacggtgatctcgaaatcatcacgcatcgaggcgtgggactctgccatcagctcacccatccgcttcaggtcgcctttttcgagggcgctggcggcttccacagtgcgggcattctccgtcagcacgtggcgtacgcgcttcgcgaccaccggatccagctcatgggcgacggcgttaaattgctcaagggtgacatcgcgcagggcgggctgctggaagaagcgcgcgccggtttcgcactgttcacgacgggtgttgtactcgctgccgacgagagtacgcttaaagttgctgttgatgatcaccaccgccacgcctttcggcatcgagacggctttggtgcccagcgaacggcagtcgatcagcagcgcgtggtcttttttgcccagcgctgaaatcagctgatccatgatgccgcagttgcagccgacgaactggttttccgcctcctggccgttgagggcgatttgcgcgccatccagcggcagatgatacagctgttggaacacggtgccgacggcgacttccagcgaggctgaggagcttaaccccgcaccctgcggtacattgccgctgatcaccagatccgcgccgccaaagtggctgttacgctgctgcagatgctttaccacgccgcggacatagttcgaccactgctgggtgtcgtggctgataatcggcgcgtcgagagagaactcatcggtctgattgtcgtaatcggcggcaatcacccgcacggtacgatcgtcgcgcggcgcacagctgatcaccgtctggtagtcgatagcgcagggcagcacaaaaccgtcgttgtaatcggtatgctcgccgatcaggttgacgcggcctggcgcttgaatgacattgctggccgggtagccgaaggcgtcagcgaacagggtttgggttttctctttcagactcatcattacactccggattcacgaaaatggacgtcgctgacggcgcgcagtcgttcggcagcttgctcggcggtcagatcgcgctgagtttcggccagcatctcataaccaaccataaacttgcggaccgtcgcggagcgcagcagcggcggataaaagtgggcatgaagctgccagtggttatggtcttcgtcgttaaacggcgcgccgtgccagcccatggagtaggggaatgagcactggaacaggttgtcgtaacggctggtcagctttttcaacgccagtgccagatcgctgcgctgggcgtcggtgagatcggtaatgcgctgcacgtgcgctttcggcaacagcagcgtttcgaacggccaggcggcccagtagggcaccaccgccagccagtgctcggtgtccaccaccgtgcggctgccgtcggccagttcgcgctgcacatagtccagcagcatcggctggccctgtgcggcgtaatactctttctgcagacggtcttcccgttccgcttcattgggcaggaaactgttggcccacacctgaccatgcgggtgagggttggagcagcccatcgctgcccctttgttttcaaaaacctgcacccacgggtagcttttcccgaggtccgcggtctgttcctgccacgttttaaccacgtcttccagcgcttcaaggctcagttccggcagcgttttgctgtggtctggcgagaagcagatcacccgactggtgccgcgggcgctctggcagcgcatcagcggatcgtcactctccggtgcgtccggggtgtcggtcatcagggccgcaaagtcgttggtaaatacgtaggtaccggtgtaattcgggttggtgtcgccggtcacccgggtgttgcccgggcacaggaaacagtccggatcgtgggccggcaaggtctgttttgccggcgtttcctgcgccccctgccaggggcgcttggcgcgatgcggagaaaccagaatccactgtccggttaacgggttataacgacgatgtggatggtcaacggggttaaatacgctcatgaaggttccttagtctggataaccctgcggatgacgggactgccagtgccaggtgtcctgcgccatttcgtccaggttgcgcgttacgcgccagttcagctcgcggtcggccttggcagcatccgcccagtaggccgggaggtcgccatcgcggcgcggcgcgaaatggtagttaatgggtttgccgcaggccttgctgaaagcattgactacgtcgagcacgctgctgccgacgccggcgccaaggttgtagatatgcaccccggctttgtcagccagtttttccatggccgcgacgtggccatcggcgaggtccatcacatggatgtaatcgcgcacgccggtaccatcttcggtcggatagtcgttaccaaaaatggccagcgattcgcgacggccaacggcgacctgggcgatgtagggcatcaggttgttcgggatcccctgcgggtcttcccccatgtcgcccgacgggtgggcgccgaccgggttgaagtagcgcagcagggcaatgctccactccggctgggctttctgcaggtcggtcaggatctgctccaccatcagcttgcttttgccgtaggggctttgcggggtgccggtcgggaagctttcgacatacgggattttcggctgatcgccgtagacggtagcggaggagctaaagataaagttcttcacgccagcggcgcgcatggcagagactaatttcagtgtgccggtgacgttattgtcgtaatattccagcggcttggcgacggactccccgacggctttcagcccggcgaagtggatcactgcctcaatggcgtgatcgtggaggatctccgtcatcagcgcttcgttacgaatatcgccttcaataaaggtggcttctttgccgccgagacgttcaatcaccggtagtacgctgcgcttgctgttgcagagattgtcgaggatcaccacctcgtgtccctgctgcagcagttgaacgcaggtatgacttccaatgtaaccgctaccacctgtaaccagaactttcatgattcgctccattcggcttatcgtttgtgaggaagatagcatatcaaagaagtgaaaagtgtgacatagggcaagttagtggaatcgtttacactcaagggcgaaatgatatcattgaatatattttgctttaaaaacatgtcattatattattttggcgctatttttctgaaaaataccagggatctttcgatccccggcagggggcgtcaggccacggggccgagctgataagtgtaaccgtctccactgggaacgaacgccaggcgatgggtaatacagtccggggcatcttccgcatggtgcgagacaaacagcagctgtgtggccccttcgccaatcaacacgtcgacaaagcggcgcactagctggcggttgagggggtccagcccctgcagcggttcatcgaggatcagcagggttggatgcttcaccagcgcgcggacgataagcgccagccgctgctggccccacgacagactgtgaaacggcgcgtcggcggtgcgcttatcgatgccgagaatatccagccattgctgcaccagcttatgctgcttgtcggagaccgcctgataaatgccgatcgagtcaaaatagcccgacaggatgacgttgcggacgttggtgctgacccggtagtccagatgcaggctgctgctgacgtagccgatatgctttttaatatcccagatggtctcaccgctgccgcgccggcggccaaagagcgtgagatcgttgctgtagccctgcggatgatccccggtgaccaggctcagcagcgtagatttaccggcgccgttgggaccgacgatctgccagtgttcgcctggattcacggtccatgagaggtgattgatgaccgggcgatcgttataggagaccacgccgtcgttgagcacgatacgcggcgccgagtctgccagcgcatgacgggccggtgggacatccggctccggcagggtgatgccgtccagtttttcactgtgcgccagctgggcgaccagcgcctgctgcagcagggaagacttctcgccggtctcgctgagggtgcagtcagccagcacgccggcgaattgcacaaactccgggatctcatcgaaacggttgagcaccagcaccagggtgatgccggcgctgtgcaggtcggccagcagggcagccagctgctggcgggagttgacgtcgagaccgtcgaaaggttcatcgaggatcagcagttgcggatcggtcatcagggcctgacacagcagggtcttacgcgtttccccggtcgacaggtatttaaaccggcggtccagcagggcgctgatgccaaactgttcagccaggcgcgcgcagcgggcaggatctttcacctcatcctggataatctccgcggtggtgcggccggtatcttcttcgcctgggctgagcaggtcggtgttattgcgctgccactcgtcgctgaccagcttctgcaactgttcgaaggagaggcgggtcacgcgggagaaatggctttcgcgctggccgctgagcaggggcaggtcgccggccagggctcgcgcgagggcggatttgccgctgccgttgctgccgacgaacgcccagctttcacccgccgccacgctcaggtggtctatttttaaggtctttgtatcgctcaggcgaaacgtgccttgcgaaatttgcaatgatgacatgatgtatcccattttttgcagcgatgtgcatcagggatacgacttcaggcgcgtaatgtcaatggggtcagcataacgtcgcgagaatgatgcgatcggcattgaagtaagcgatcgcctccgttccttccgccaggccagcggcctgcgcctgtggcagggtggcgcacagggtttgaccgtccgccagggtcatcagtacttcgcactgtccggacccgcattcgatatgactgatacgtcccgacagctggttatcggcctggcgggctgctgcgggatcgagggtgatgccgacccatggcgctttgagcaggaccagcacctcctggccctcatcgagtcccagcttctcagcgctttgcgcggtgatggcgacgttcaggcgggtttttccgtcagccaacagtacttccacgtgctgctgcacctgctggcgatcgcggccggtaatggtgccgaaccactggttgcgggcgctggtctgcagggaaaagcgcgagatggccgccagcaggctatccagcggcagggcatcgtcatcgctgagtacatcaaacgctttctgctggatctgcgccagcagatcgtacagctggatcagacgctgcccgtagcgggtcagcaccgcgccgccgccgccctttccgccggtggcgcgatccaccagcggctgttcgctgagctggttcatctcattgatggcatcccaagcgctcttatagctgatacccgcatgcttcgccccctggcttatcgaaccggtctggtcaatctgtttgagcagggcgatccgccgcggatcggcaaacaggcgctgctgtagcttaagggtgagaagaatttcggcctgcataatcgtttcctgacaaaaaagggtattgtgaccgatagtcgcccacttgcaaaacctctctgcgcggttggtcattacccaccgcacaaatgggacgtgttttttcggctgaaatcgttacaatcaggaaatcatactatctggagtgaaccatgttagagcttttgaaaagtctggtttttgcggtcatcatggtaccggtggtgatggcggtcatcctgggactgatttacggtcttggcgaagtgttcaacctcttctccggcgtaggccacaaagatcgcagccagcaaaatcactgatttcccggcgcccggtttaaccgggcgctgtgctatttccctcctgtatcatttcccttcgttttattgtcctgtatcactataaaaacgcttcgcatatcgttatattatcgactacataacgcattgacaggagagtaagatggcaggttcttggttacgcggggttgtcggggtatcactcacgctgtgcgtcgcgggtcaggcgctggcggcagagggtaaagtgaccgttttcgccgccgcatcgttaaccaacgcgatgcaggatattgcccaggcgtacaagaaagaaaaaaacgtcgaggtcgtgtcgtcgtttgcctcgtcgtcgacgctggcgcggcagatagaagcgggtgcgccagcggacctgtttatctccgccgatcagaaatggatggattacgcggcagataaaaaggccatcgttccggcaacccgcgccactctgcttggcaacagcctggtggtggtcgcgccgaaagccagtgcgcagggggcgataaccattgatgagaaaaccgactggaccagcctgctgaaaggaggccgtctggcggtgggcgatccacagcatgtcccggccggtatctatgccaaagaagcactgcagaaactcggtgcctgggagacgttgtcgccgaagctcgccccggctgaagacgtgcgcggtgcgctggcgctggtggagcgcaacgaagcgccgctggggattgtctatggctccgatgccgtggccagcaagggggtgaaagtggtcggcaccttcccggaagcctcgcatcagaaagtcgagtacccgctggcgattgtcgatgggcaccgcaatgcggctgtgagcgccttctatgactacctgaaagggccggaagcgtccgctatctttaaacgttacggatttaccacccgctgatgtttctgagcgaacccgaatggcaggcggtgctgctgagcctgaaagtctcctccctggcggtggccttgagcttgccctttggcatctttttttcctggctgctggttcggcgcacctttcccggcaaggcgctgctcgacagtattctccatttaccgctggtgctgcctccggtggtggtggggtacctgctgctggtggccatggggcggcgcgggtttattggcagctggctgtatgactggttcggcatcagctttgcttttagctggcgcggggcggtgctggcggcggcggtgatgtctttcccgctgatggtgcgcgccattcgcctggcgctggaaggggtggacgtcaaactggagcaagcggcgagaaccctcggggccagccgctggcgggtatttttgaccattacgttgccgttgactctgccggggattattgtcggcacggtgctggccttcgcccgctcgttaggggagtttggcgcgaccatcacgttcgtctccaatattcccggtgaaacgcgcaccctcccttcggcgatgtacaccttgattcaaaccccgggcggggagggggcggcggcccgcctctgcctcatcgccatcggtctggcgctggtttcgctgctgatttcggaatggctggcccgcgtgagccgccagcgcatgggaggataatgatgctggagctggactttacccagaccctcggtagccactgcctgcagatccgtgaaactctgcccgccagcgggatcaccgccgtctttggcgtctccggcgctggcaaaacctcgtttattaacgccatcagcggcctgacccgaccccaggcggggcggatcgtgctcaatggccgggtgctgaacgacaccgcgcagcgtatctgcctggcgccggagcagcgccgtatcggctatgtctttcaggatgcgcgcctgtttccccattataaagtgcgcggcaatctgcagtatgggatggcgaaatccatggtcagccagttcgataagctggtggatctgctggggattgcgcccttgctggatcgtctgccgggccggttatccggcggcgaaaagcagcgagtggctatcggccgcgccctgctgaccgcgccggagctgctgctgctggatgagccgctggcctcgctggacattccgcgcaaacgcgagctattgccctacctgcagcggctggcgcaggagattcatattccgatgctttacgtcagccactcgctggatgagatccagcatctggccgatcgtgtgctggtgctggaggccggtaaggtgaaagctttcggtccgctggaggaggtctggagcagcagcgtgatgcacccctggctgccggcggagcagcagagtactatccttagcgccaccgtcgccgcgcagcacccgcagtatgcgatgacggccctggcgctgggggaccagttgctgtgggtcaaccggctcgaacgtcccgcaggcgacaccgcacggatccgcattcaggcgtcggacgtttcgctgacactggcccagccgtccgggaccagcatccgcaatatcttgcgcgccgaggtggttcagtatctggaggtcaacggacagattgaagtgcagctcagagtgagtggccgtctgctatgggccaggattagcccatgggcgcgggacgacctggcgatagcgccaggtcagcaggtgtttgcccagattaaaagcgtgtcgatcgccgcctgattacagcagttggcggtagataaactcggcgatgctggtggactcattgtcgccgatgactatgttggcgcgggctttcacctcgtccaccgcgttgcccatcgccaccccggtgcccgccgcttccagcatgctaagatcgttgtagttatcgccgaaggccaccacatcctgcatcgacagcccctggtcggccacccattgcgccaggcgtttgcctttgctgttgccggcgcgcgcgatatccacctgatcgtgccacgaccattcgcactcgaggcccagcgtctcgccaacctgctgcgcaaaccgctgcaggcggggaatgtcgtcatcggtgagagcgaatttccataccgcgttaacttcgcgaaccgcctgcgccagcgaatcgacctgagcgaaaaccggacgctgatcttccggtaacgcctgcgcccagttgcgggtgcggatcacatgcccggtggggtgttcataaagcatcgcgtcgtccacatatgccaggccgtggatctgctgtttggcgagcatggcagtgaggcttaccgcttgctccaccggcataggatcggcggccaaaaccttttttgcgtgataatcatacaaataggtgccattacaacaaattgcaggtgtatcgagagccagtgcctgataaaaaggatggatagcgacgtgatgacgtccggtgacgacgatgacctgatagcctgcctctctggcgcgggccagcgcctccagcgaagcgggcagaatggtttttttgctggtaagcagggtgccgtctaaatccagggcaatcacgcgtgttgtcatgtgttatttccggttgatgttgaaaagtgacctggccatgatggtacaccgccgtggcgtcaggaccaatttttccacatctgccgtgaatgtctgtatgccctttgtgccgccgtccggcggaaattcggcggacgatgcgagtatcatgggcggatgtcttataattttcagggtgctgttatcctgaaaatgaaaattccacgtgcagtgagggaaggagtagtcatgaaacaaaccgtttataccgccagcccggaaagccaacaaatccatgtctggagtcttgaagcggacggcaaactgacgctggtgcaggtggttgatgccccagggcaggtccagccgatggtggtcagccccaacaaggaatttctgtacgttggcgttcgtccggagtttcgcgtgttggcctatcgcatcacgccggataacggggcgttaacctttgcgggcgaagctgcgctgccgggcagcccgacccatatctctaccgatcgtcatggccgctttgtcttcagcgcctcctacaatcagggctgtgtcagcgtgaccccgctgcacgacggcctgccgggcgaaaccatcaccgtggtggaagggctggaaggctgccactcggccaatatctccccggataatcgcaccctgtgggtgccggcgctgaagcaggatcgcatttgcctgtttaccctcagcgacgatggtttcctctcggcacaggagcccgcggaagtgacgaccgtcgagggcgccggtccgcgtcacatggtattccatcccaaccagcagtatggttactgcgtcaatgagctaaacagctcgattgacgtctgggagctgaaagatcctaagggcaacatcgaatgtgtacagaccctggatatgatgccgcctgattttagcggcgtgcgctgggcggcggatattcatatcaccccggatggccgtcatctttacgcctgcgatcgtaccgccagcatcatcacggtgttcagcgtttcggaagatggtagcgtgctggcggtggaaggctatcagcctaccgagacccagccgcgcggctttaacctcgatcacagcggtaaatatctcattgccgccgggcagaagtcgcaccatatcgcggtgtacgatatcgtcggtgagcagggactgctgcaggagaaaggccgctatgcggttgggcaggggccgatgtgggtggtggtcaacgcccactgaaccgccatcaggtaaaagaaaaaacctcgccttagcgaggttttttttgctcagagcggacaggctctgcggagaaggcgttgtcctggcgggccagaagcgtgacgacgttagatatcgtccatggtgtagccaacgacaatctccagcgtttttcggatcacgtccgcggtcaccacgtcatcggtggtttccagcgcctgaatcagccataaaataatggccttattgttcaggtgaccctcggactggagaatactgttgatggcgagcgacatgacggcggactcatcaaccagtttatcaccggcgttacggaaatagtcggagagcgcggtgtcctgcagtcttgcgtaaatatctggttgctgatgcatagtctgtctcatcacattctcactctgtttaattcaccatggttgggataatcagtggatctttttagcttccgacggcatgctgtctggcgccagcgaacctctggtttcccaacggccattgattttctttacctgtaaaggcgcgtacttccgctgacggataagcttcgcgcaaatttcttcgatcacggcagcgatgatctttctacgctggcgatctggttctgtcgcctgcattaaccgaagtcgaaccagcagggtcggggtggtaatcgggcgattcgttttcagaagcgctagaaccgcctcgccgatgatttcatcggttatttcctcagtttcactgttattcataaccgtctctatgcatgccacccttttcctgaataggcgaacggcattcaggtcagcagcaggtttgtggaagcgatcgcccctcatctgctactgcggcgctgcaacaggcgacgatcgatgacgttattcctggccagcaaacagcagaccaattaaggtctgatagtggctctcttcctccggcgcgcgagcgcggtccaggcggctcaacagtttggtgcatagcgctttgcggttgagatgacgcccttcgttaagaatatccatcacgatctgacccagggtttcctgctgggaaggcaaagatgctttgttgaaatactgggcaattgcgttcgctgtatctggaatgtaaccattctgctgcatatgtgctcctttcatttcattcatctgttaactgccattaaacttatacaataattattaacctgtacacacaaagttgcacaataatgattcatgttagtttaactatatgatttttaattgtttaatttttttttgcctggcgcggttctggcttgtaaaggtggggtttagcgttgcatgttgtacaaggaaagaaaaaaagggaaaaccttgcacaaaaaagggatttttagtgtatcttttttgttaagacaaaacgtagttttacgagacccttagcctgataactgctactgtgaatgcttatccctcccatctggaatcactatgctaaccaccatcatttatcgcagccatatctgcgacaatgtctcattcaaatcgatcgaggccatggtcgccagggcaaacgaaagaaatgggcaggcggacgtcaccggtattttactttttaacgggacgcatttttttcaactcattgaggggcctgaagaaaaggttcaggatatttatcagcatatctgccgggatcctcgccactataatctggtggagttgctttgcgattatgcgccgtcccgtcgttttggtaaggtcgggatggaactgtttgatttacgcgaacacgatcgcgaggaagttctgcaggcggtgatggaccgggggacgtcaaaatatcagctcacctatgatgaccgggcgctgcaatttttccgtacttttgtcgaagccacagaaaaagcgaactattttgagattccttccgcagatagttgggtttttattcctgataaggagacgttctatcctgataccccgattatcgataatacggaaggttgttcctttgccttccagccgattgtcgaccctttcgcctgcgaaattatttcgtgggaagcgctgttgcgtacaccggacgggcaatcccccggcgcctattttgccgggctgaccggggacgatatttatctcgccgacctgcacagtaaacgggtggcgttgtcgctggcgggaaaattaggtttacgtaataaggcgttaagcattaatttactgccgatgaccatggtcaaagcgccgaatgcggtggctttcctgctcgacgaaattagtcgcaatgaccttattccggagcagattattgtcgagttcactgagcgggaagtgatttcgcggatggacgattttaccgatgcggtgcgcaaactgaagggcgcgggaattaatcttgccatcgatcacttcggcgccgggtttgccgggctatcgctgctggcgcaataccaacccgacagaattaaaatcgaccatgagctgatccgcaatatccaccaggacggaccgcgccagtcgattgtacaggcgattatcaaatgctgtacttctctggagattgcggtctcagccgtcggcgttgagcgtgctgaagagtggatgtggctggaatcagccggtatttcacagtttcagggcaatttgttcgccagcgcgcgcctggggggcctacccgccgtcgcatggccggagaaaaaatgaaccaccgcgaaatcagctaaacattttttcatcttttttcccgggcgctgtgagccgcaacctgatatctttatctgtacaagaaaatagagttgtacaggatgcctgaattcgttagtttaggtattaaggtatcaggttgatgtgaggctgctatggcgttttacagtatcggtgaagtcgccgaacgttgcggaatcaatccggtcacactgcgcgcctggcagcgtcgttacggtctactgaaaccgcagcgtagcgaaggcgggcatcgacaatttgatgaagaagatatcctgcgtatcgaagagatcaagcgctggatagagcgcggtgtatcagtagggaaagtcaaagcgctgctggaggataacctgccggcggcgcgcgacgaatccgcgcatcttcaggaagagatgatgtccattctgcgttatatgcagcccgccagaatccgcgccaaattaatggcgctgagtcatcaacaccccatcgacaccctcatcgatagcctgttagtgccggtacgacagcgtctcaagctggatcagaatacctcgctggtgattagcagcatgctggacggcctgttaattgactgcgtagcgttgtttctcgccgaagcgcgtaaaaaaaatggcaaagagacgctgctggtgggctggagcaatgaggacaggacgcgtctgtggctggaggcatggcgtctttcccaacgcggctggcatgtcaacgttctcgccgaaccgctggagtcgccgcggcctgagctatttcccgggcagcatattttcgtctggaccggacgtgccgccacgcctctgcaggaggagctgctcagccactggcaggagcagggcttcagcatccattttcacggccaaaattaagcgccccgatccgtggtgcggatcagggcttgagtgctgggttacaggtgaatctggctccaggatttgaacgtttcgctgcggctgatattaaaaaaatcggttctaccgctgcagccgagctttttaatcagattcagccggatttgataaatggtttttatatgcaggtttagcgaccggccaatgctggcgaccgcttcgccattgctgataagttgaataactttcttttcccgctcggtaaactgcaccgaggcgcctggcgccggatgggttttgtaatagcgggtgggttgatgcagaaatatctttaactcttccggcgtcgagttggccggtaagcgcagcataggcagttcactaagaaaattaagatcgttgccttcggttaacagaataaataatgtatcccgccgattatagttgtgctgcagtaccgcgaaataattgtcgctggtgaagaaaacatgttttttgcggaagtaagatgccggcaggctattcaggatcagcgacatcccatagagaagaaaaccattatcaaaccacagatcgtaatgctcagaacgatagcaagtattatggtgtgacatttttttgcctcagttagccgatagagacccaggcgcgccggtacagcaggtcgaagcctgctgccagcacagtgggtttatttaatgatgaggtttgctgtacagcatatccagcgcctgcagatagagatcggaaagtatttcgttactttccgtttgcagacgatgctggatttccgtaatcatccgctcattatttaccgttctgtgctgcttaatgagcgtattctcaatattcttcatcagggccgaattgaagacaaactctgctggaatggtatttttaatatgcatagctcgaactctcccacgtataaagcaaacagacaataaaagtcgcagcgtaccgttggtacgcgccaagtcacgaacaggaaatgtataaccaggaaccaccgtccgactcgctgcgcaatcgtcaagcttccccgctttgttgcgcaacaagcagttaacactccaaaactatagacgctgatttcactatgtacaacttttttcattactatatgtacaacgtaacggcttattttttgtgtgtgttttaatttgttgatttataataattttattaagtgataacttgtacagaaaagtcgggttgtgcaggatttagctgtaaaaccagcgggaagaagctgatgatggtagaagaaagccaattgtgaaaattctgtcatggctggcgaaatgcatgagattgcgccgacgcgcgaaggggtaaacagcaacgctgtcgtcgacaggtggctttcttccgcgtcggactctgagcatagcggaaaatatgatgaggctttgtctgctttttgcacagtaaggtaaaggggtaacgtctgccatgtcgtaaacggcccattcgatttgttggcgaataagggctgtgctacgctttttggtaacgacgcggtggtttggcatcgttatttttcccccatttccctgtcgagtcttatacccctgtcacgaccggtaaatacggcaaaagctttctgtccctggacaggccttgaggactgaggagggaaaatgcgcggcaaaagcgtgatgctcctggccgggttagcctctctcgcgcaggcgaacgaacttaacctctattctgtgaataccggttcctatgtttaccatctgaccaataatcacggacaatatacagagaatttcgaaaatcattttttctcagtggagcggaaattctctgcagactccaaatacagccttctgcttggcactatgaataacagcttcaacgatcgctgcctggcgctgggggtgagaagagactggtaccacagcggcagcgggtggaccttcaaaggcgtttacggctataccggcgaattcttcttcgacgccttcgagcattgcggcgatcatggctcctataaagactttaaggacgccacggggatcggcttttcaccctatatctaccacgctatccagtataacttcaccgattatttcgccgttgaaagcggcattattattcccagcgtgtttgtgattagtatccagtggagcttccgctaaatcgtcccgttgtcggttacaaggtaatcaccttcctgagcagcgtactggagagcgcggcaagggaaatgagcaccgacaggacaaaggtcagcgctattacccccaacttggtggctagcgaatgcacagggatgagcatcaccagcaggtgaaacacggaatagtggaggatataaactccggtcatcgctttactgaccgtcgccagcacggcctctttccactcgcggttctttttaaactgcacggcgttagcggcgatcaccagcaggacgatcaggatataaatttgcgatcccgtgagaatgaacgcattacgatctgctttaaacagggcgaagaagaaatggcgttcataaaaccaggtaaataaatagacaaagggcagagcgataatcgaccctttaatcacctgtgggttgcgtatccactccgcgacctttggatcgttaaacaactgcccggttaaataaaacagtagccatgtccacaggcgatactgcggcggcaaactgaaaagatgtctgtccgggtagatcaccgagagcaggtcgtaaccgtaggagcagcacagcagcgtcaggagcacggcgaaaaagagcccgcgccgctggctgagccaggcgatcaaaggatgaaaggtatagatgacaatcagggcgaaaataaaccagggctggatcaggtagccgcgctggtaaggctcccagacataatagaccgtcacccaaaacagaaagacgatgaccacgcttttaattttaccaatttgccagttggcatcgtggcgcgtctgcgcatcaagatagccggccacgacaaaaaacagcggcgtcgcgatggtcgagataaaggtcagcagcccgaggatccagtgatagtcataatcaaagcgatcccaggtgttatagatggtgaaaaaggtcaccgctgtcatacagccttcacgtgatggacggctttgccatctggcgcgtagcgtttgtggggtcaatgattgcggtcagcgcctttattctcgaagcctggctgcagccgcgcggctattcgccggagtttattcgtaccgtgctgttgcagactctggtcaccgcccagtggttctatatgctgaactgccgcgtatcggatggattctcgttaaccaaaggtctgctggccaacaaagggatctggatcgtcagcggcgtactgctggtgctacagctgctgattatctacgcgccttttatgcagatgctgttcggcaccaccgggctgccgttccgctactgggtgatcacctttatcatcggcttcgccatgttcctgatcgtggaactggaaaaaccgctgacccgcaaatggcgttccgcctgacggcgtgaagcgctgaacgaaaaagaaaagagggggcatcgccccctctctggctgacgacaaacctgtttcgtcattgtgctcgcatttctgccgggtggcgactttcgccttacccggcctacgaaagacttcaatatcaaaccgttatgcagttatctgtagggccgcgcaagcgcagcgccgccgggcaattcctgaagattgcacgttgtcagcagtttgagagagggcatcgccctctcttttattatggttcacgcttgttgcgctttactgtttcggctcggcgaccacggtgcttcccacgccgcggttattgtactcccacatgcggttgaagccgttgtcgttgaggttgcgctgcagattgcctttgtcatcggcgctgccggtgttgccgctgaacgggcggccggagcctaccgccgccgcccacggctgggcaatattaaagccttcattgatagcgctgtcgcggatcaccacctggccgttgctattgccatcgacatccagcgcgcggccgagctgcgcgacgttatccccggaggcggtgaagcggctgttggtcgccaggaagccgtaggtcacgctcttcagagtagccggcgcgaagacgtaggcctctttctgggtacgggaattcaccacgcggaaatcggtgttatcaaacaccaccgcgccgcggccggaaacgatatccacatcgccttcaatgtagctgttggtcaccagggtgcgggtctgacggttgtcctgcagacggttttgcacgccgctgttggtcacgaagaaggtgttctgacggccaagaatattgaccttattgatctgcacctggtcgccatcgctgcgcaatgccaccgcctggtgggtaccggcgtcaacgctgtcgccgaggttgttggcgatggtcaggttctgcagctgcagaccattattctgtgaccagaagactgcggaacacattacgccgatggtcgccgcggatttgctttggcaactgtcgaacatataccacgccggtttacccggcatatatttaccgcctggattgaccagacgacgccaggtgttgcgatccatctcggaatcaatggcttcgctgattttcacgtcgattggcttatcgccagtaccatacagggtcagggcgcccggcgccgccggaacgtagacggttccagggtactcgcccggcataatcgcgatatacagacgacggttagagtgacgggcaattgccgcatccaccgccgcctgaatggtggtatgggttacgccctgggttcccgcagggccgacgataaagtcaggctgcgccggcaggctgatggcagacggcgtccaggcggcggcgttgggagccagcgactggaaataggccgccggcgtgaagtttttcgcttcttcggcgttgagtatgggacgcgcggtagtgcccggtgcagtctgcgttgagggctgttgatcggcaggcgtcgagctacaggcggacagcgtcacgccgaaggccagcgccagcgccagacgggaaacggaatatgtgttcatgttgctccgggcaaaattaagcgtagtgaaataccccggctgagacgccagggtataagtcctttaaaacctgctgttttatactaacttgaacgaaacgggaagacgtggacggaaaaacttaccgtctttacgcaacgcgcagccctgccggatggtctttagtcacaaaaaaataacatttccctgcgctattgttgactttaccggcgttatgaaaataaatgtctatacaacccatgacaagttaagcgctatgactgaagccacttccgaactcgttatctggcgaaacgggcgtctcgccaccctgaaccccgatcacgctcaaccttacggcctgctggagcgccatgcgctgctggtgcgcgacggccgcatcgcggcgattgtcgccgaagatgacgtccccagcgggcgcagtatcgatcttgaaggccggttggtaacgccgggattaatcgactgccacacccatctcgtcttcggcggcagccgggcccaggagtgggagcagcggctgaacggcgtgtcgtatcaaaccatcagcgccagcggcggcggcattaactccaccgtgcgcgccacgcgcgacagcagcgaagctgaactactggcgctggcccagccgcgtctggaacgcctgctgcgtgaaggggtgaccaccttggagatcaaatccggctacggcctcgacctgccaaacgaacgcaaaatgctgcgggtcgcccgacaactggccgatcataatggcgtggaactgtcggcgacgctgctctccgcccacgccacgccgccggaatatcaaggcgatgctgacggctatattacgctggtctgcgagaccattttaccgacgctgtggcaggagggactgtttgaaagcgttgacgtcttctgcgaaaacgtcggcttcagcccgcagcaaactgagcgcgtctttcaggcggcgcaggcgctgggcattccggtaaaaggccacgttgagcagctctcgtcgctgggcggcgcgcagctggtgagccgctatcatgggctttccgccgaccatatcgagtatctgacggaagagggcgtggcggcgatgcgcgaaagcggcaccgtggcagccctgctccccggcgcattctacttccttaatgaaacccgtaaaccgccggtcgagctgctgcgcaagtaccaggtgccgatggcggtggcgaccgatttcaaccccggcaccagccccttcgccagcctgcatctggcgatgaacatggcctgcgttaagtttggcctgacgccggaggaggcgtgggccggggtgacgcgccatgccgcgcgggcgctggggcgccaggccagccacggccagctggcgccgggctttgtcgctaacttcgccatctgggatgctgagcatcccgtcgagatggtgtatgagccggggcgcagtccgctctggcatcgcgttgttcaaggagagttgcaatgatgctgtggcaagctacgccagccagtctctggcagggacgcgacgacagcgcggaagcgcccaatgcgctgcgcctgttccagaccatcgtccgcgcggaacgcttcgcgccgcaggagatgcccggcgatatcgcgctgctcggcttcgcctgtgacgaaggggttcggcgtaacaaggggcgtaccggggcagcggacggcccggcgaccctgcgccgggcgttggccaatatggccagccatcagggtcatgaccgctgcgtggatatgggcaccatcagcgtcgacggcgagcagttagaagccgcgcatcaggcgctgcgcgaggcggtggccgactgtcagcgggtgggtaaacgcacgctggtcctgggcggcggccacgagacggccttcggccacggcgctggggtactggatgccttcccgggcgaaaaagtgggcattattaatctcgatgcgcatctggatctgcgctttgccgactgcgccagctccgggacgccgttccgccagttggcgctggagtgtgacgcgcagcagcgcggttttcactatacctgcatcggggttagccgggcggcgaacacccaggcgctatgggatgaagcggcgcgccgccaggtggctatcgttgaagatctggaggtgctgacagccttcgaaactcgcgtgttgccggagcttgagcgcaatatcgcgcaattcgaccgtctgtatctgactatcgatctcgacgtactgccggcgcgagaaatgccggcggtgtcggccccggcggcgctgggcgtgccgctggccacgctgctgcgcatcgttgagccgctgtgccgcaacggtaagctgcaggcggtggatctggtggagtttaacccgctgtttgacattgacggtcagggcgctcgcgcggcggcccgtctggcatggcaaatcgcccattggtggcgctagcgatccgcgctattattttcgtttcgccgctccgcttattacgcataaggaaagccaggccatgtttgcacaacaacctcgttccgcgcccgcgcctttctatgaaaaggtgaagcaggcgatcagcgaaaagatccacagcggcgtctggcgaccgcatgaccgtatcccgtcggaagctgagctggtggcccagttcggcttcagccgaatgaccatcaatcgcgcgctgcgtgagctgacggacgaaggcctgctggtcaggttgcaaggggtgggaacctttgtcgccgagccgaaagggcagtcggcgctgttcgaggtgcgcagtattgccgcagaaattgtcgcccgtcaccatcagcaccgctgtgaggtactcctgcttgaggagacccgggcggatcatattcaggcgacggcgctcagcgtcccggaaggcacccgcatctttcactcgctgatggtgcattacgaaaacgaggtgccggtgcaaatcgaagatcgctgcgtcaatgccgcagtggtcccggactatctgcatcaggactacaccgccaccacgccccatgattacctgtcgctgatcgcgccgttaactgaaggtgaacatattgttgaagcggtgcaggccacggcggaagagtgcgcgctgctgcatattcacgcccacgatccgtgcctgctgatccgtcgccgcacctggtcgacaacccacatcgtctcccacgcgcgcctgctgttccccggtagccgatatcgtctgcaggggcgctttggctcctgatccacgctggcgtcagcaaaacgtgattgctgacgcaatataacaaaattgtatcatttctgttaaatcctggcttgcgcatgcttgtatagacaagtatatgtatctacgtaaacaacgttcattgtcaggagaaaccccgatgtcgcaaagcaaatatcgccagctggacgtccgtgcgccaagaggcacgacgctgaccgcgaagagctggctgaccgaagccccgctgcgtatgttaatgaataaccttgatcccgatgtcgccgaaaacccgcacgagctggtggtctatggcggtattggtcgcgcagcgcgcaactgggaatgctatgacgctatcgtgaaggcgctgaagaacctggaaagcgatgaaaccctgctggtgcagtccgggaagccggtgggcgtattcaaaacccatgaaaactcaccgcgtgtgctgatcgccaactccaacctggtcccgcactgggccacctgggaacactttaacgagctggatgccaaagggctggcgatgtacggccagatgaccgccggcagctggatctacatcggcagccagggcatcgtgcagggtacctacgaaaccttcgtcgaagccggtcgccagcactaccagggcagcctgaaaggccgctgggtattaaccgccggtctgggcggcatgggcggcgcgcagccgctggccgcgacgctggccggcgcctgctcgctgaacatcgaatgtcagcagagccgcatcgatttccgtctgcgtacccgctacgtggatgagcaagccacctcgctggatgacgccctggcgcgcatcaaaaaatacaccgccgaagggcgggccatctctatcgcgctgtgcggcaacgccgcggagatcgtaccggagctggtgaagcgcggcgtgcgcccggatatggtcaccgaccagaccagcgcccacgacccgctgcatggctatctgccgaaaggctggagctgggaagagtatcagcagaaagccgaatccgacccgcagggcactattctggcggcgaaacgctcgatggccgatcacgtgcaggcgatgctggccttccatgagatgggggtcccaaccttcgactacggcaacaacatccgccagatggcgcaggaagtgggcgtcagcaacgccttcgatttcccgggcttcgtgccggcctatatccgcccgctgttctgccgcggtatcggcccgttccgctgggtagcgctgtccggcgatccgcaggatatctacaaaaccgacgcgaaagtgaaagagatcatcaaagatgatcagcatctgcaccactggctggatatggcgcgcgagcgcatcagcttccagggactgccggcgcgtatctgctgggtcggtctggagtggcggcaaaaactcggtctggcgtttaacgaaatggtgcgcagcggcgaagtctccgcgccgatcgtcattggccgggatcaccttgactccggctccgtcgccagcccgaaccgcgaaaccgaagcgatgcgcgatggttctgatgcggtctccgactggccgctgctcaacgccctgctcaataccgccagcggcgcgacctgggtgtcgctgcaccacggcggcggggtaggcatgggcttctcgcaacactccgggatggttatcgtctgcgatggtaccgatgaagcggcggcgcgtatcgcccgcgtcctgcacaacgacccggcgaccggcgtaatgcgtcatgccgacgcggggtatgagattgccattgaatgcgcagcagaacagggtctgaatcttccgatggtggcggcaacgcaggggaacgctaaatgaaatctttaactttgatcccgggtcaactcagcctgtcgcagctccgcgacgtttacagccacccggtaaatattaccctcgacagcggcgcgtttgccgccattgacgagagcgtggcctgcgtcaacgccatccttgccgaagggcgtaccgcctacggcatcaacaccggttttggcctgctggcgcaaacccgtatctcgacggaagatctggagaacctgcagcgttcgctggtgctgtcccatgcggcgggcgttggcgagccgctggacgatgatctgacgcggctgattatggtgctgaagattaacagcctgtcccgcggtttctccgggatccgcctgagcgtgatccaggcgctgattggcctggtgaatgccggcgtgacgccgtggatcccggccaaaggctccgtcggcgcttccggcgacctcgcgccactggcgcatatgtcgttaaccctgctcggagaaggtaaagcgcgggtacgcggcggcgaatggctgccggccaccgaagcgctgcgtcaggtggggctggagccgattaccctggcggcgaaagaggggctggcgctactcaacggcacccaggcctcgaccgcttttgccctgcgcggtctgttcgaagccgaggatctgttcgcctccgcggtcgtctgcggggcgttaaccaccgaagcggcgctgggctcacgtcgtccgtttgatgcgcgcatccatgaagtgcgcggccagcgcgggcagattgatgcggcggcgctgtatcgccacctgctgaccgacgatagcgcgatctcgcagtcgcaccataactgcagcaaggtgcaggacccgtactccctgcgctgccagccgcaggtgatgggcgcctgcctgacgcagatccgccaggcggctgaggtgctgctggctgaagccaacgcggtctccgataacccgctggtctttgccgccgaaaatgacgtcatctccggcggtaacttccatgccgaaccggtggcgatggccgcggataatatcgcgctggcgatcgccgaaatcggctcgctctccgagcgccgcatcgcgctgatgatggacagccatatgtcgcagctgccgccgttcctcgtcaaaaatggcggcgtcaactccgggtttatgattgcccaggtcacggcggcggccttagccagtgaaaacaaagcgctgtcgcacccgcatagcgttgacagcctgcccacctccgcgaaccaggaagaccatgtttccatggcgccggctgccggtcgccgcctgtgggcgatggccgagaacacccgcggggtgctggccgttgagtggctggcggcggcgcaggggctggatatgcgcgaaggactgaccaccagtccgctgctggaagaggcgcgtcacttgctgcgcgaacgcgtgccgcactatacgcaggatcgctacttcgccccggatatcgataacgccattgcgcttctggcggcccgtcacctgacgcgtctgctgcctgccgtactgcattaatcaccgttgttctctgtacccgcgtcgggggaagtcattcccccgaccgccctacaccgcatatttgtcgtcatataaaaaaatcaggacacctgtatatgcaacaacaacacaagccacatctgctgcgcgggctcaatgcccgacacattcggtttattgcgctcggctccgctatcggcaccgggctgttctatggctcggcctcagccatcaaagcggcgggcccggcggtgctgctggcctatctgattggcggcgcggcggtgtttatcgtcatgcgcgcgctgggcgagatggcggtgcgcaacccggtttccggctccttcggcagctatgcccgccagtatctcgggccactggccgggtttattaccggctggacctacacctttgaaatggtgatcgtcgccctggccgacgtcaccgccttcggcatctatatgggattgtggtaccccgatgtgccgcgctggatctggatcctcagcatcatcttctttatcggcgcgatgaacctgtgcaacgtgcgggtatttggcgagatggagttctggctgtctctggtgaaggtggtggcgattatcgccatgatgctggcgggggcggggatcatcttctttggctttggccacagcttcccggccaccgggctggaaaacctctggagccacggcggctttgcccctaacggctggcagggcgttatcgcctcgcttggcatcgtgatgttcgccttcggcggggtggagattatcggcgtcaccgccgcggaagcgaaggatcctaagaaggtgatcccgcaggccatcaataccattccgctgcgcattatcctgttctacgtctgcaccctggcggtactgatggcgatcttcccgtggaacagctttggcgaacaggggagtccgtttgtgcttattttcgacggtctggggatcccggcggcggcgaccatccttaacatcatcgtgatcagcgccagcatctcggcgattaacagcgatatttttggcgccggacgcatgatgtacggcatgtcgaaagaggggctggcgccgaaaagcttccagcgcatcgccagcaacggtgtgccctggatgacggtggtggtcatgggcggcgcgctgctggcggcggtggtattgaactatctgatccccgagcaggtatttgtgctaattgcttcgctggcggcattcgccacggtatgggtgtggctgatgattctgctatcccattttgccatgcgccgcggtttgtctgccgaagagcgcagccagatcgcctttcccattccgttctggccggttgcgccgctgttgacgctgctgtttatggggctggtcatcgccgtattagggatgtttgccgaaacgcggatggcgctgatcgccggcctggtctggctcgggctgctgacggtggtgtggtatgcgcgggtgcgtaaaacggcgctgcaggtagccactgaacagtaagatcaatttccccggtggcgctgcgcttaccggggctacaaatggcacggaccgtaggccgggcaaggcgtcagccgccgcccggcataaaagcggctccgtgcccgcggcaatcgtccggcggcgctgcgcttgcgcgggcctgggggtattgtagatactgctatcggcttgtaacggttttaatccggtaaaaacagttgttttgtattaattccgagcacattgcgctcccgaaatgtcttctacgttatgtttctcatggagcagggagcgcacagggggcggccagtcgccgccgccccctgtacccccgggcttcggccagcaacatcgccactgcgtggtgccttcgacttatccctgcaggcttcgggtcgggccgaggcagcgtccttgcaaaacacggccctcagcccgcatccatgcgggctgccccggccttccgggaacgtctcagcgatgttgaggccgccagccccggcagtttcagcggccccatgtttggcggcgattcacatactgggtctggaccccgtaggccgggtaaggcgtcagccgccgcccggcaaaataaccgcgcaatagcaccgtaggccgggcaaggcgtcagccgccgcccggcataaaagcggctccgtgcccgcggcaatcgcccggcggcgctgcgctagcatgggcgtgggggtagtgtaggttgggtaagcgcagcgccacccgaaaaacaaatggcgccgcgggtaccccggataaggcgcaagccgctatccggggaagattaactgaacagggcggtgatggaggcgctggcgagggaatggaaatggacgttaaagccgaccatcgcgccgctggcctcagcatccacctcaattttctcgacgtccagggcgtggacggtgaagatatagcggtgggtttcgcccttcggcggcgccgcgccgccgtagcctgccttaccaaaatcggtgcgggtctgaacggcctcttccggcagctccgcctgaccggaaccggccccttgcggcaggacgcgggtatcggccggcaggttagcgaccacccagtgccaccagccggagccggtcggcgcatccggatcgtagcaggtcaccacaaagcttttggttcccgcgggcacatcatcccacatcagatgcggcgaaatattgtcgccatcgtagcccatgccgttgaagacgtgacgattaggcagcttaccgccgtcctggagatcgtgactgatcagtttcatgcttcatcctcattgataatgcgctgattaacaaagaagtgtagccttcccgacgacgcaattccgctatttattcgctaaaaaatgtttcgtcctgcactgcctggttgaccgcacgggtcaggcgggtcagctgctcgggcgtgatgatgtacggcggcatcagataaatcagccggccaaacggacggatccagactccctgctcgacgaaaaagcgctgcagggcggccatgttgaccgggcgacgggtttcaaccacgccaatagcgcccagcacgcggacgtccgcgaccagcgcagatccccgcgccggggccagctcggcctgcagctgggcttcaatcgccgtcacctgcggctgccattcgccgctctccagcaggcgcaggctttcgccggccaccgcgcaggccagcggattgcccataaaggtggggccgtgcataaagcaaccggcttcgccattgctaatggtttcagcaaccgttcgggtggtgatggcggcggaaagggtcatggtgccgccggtcagcgctttgcccagacacagaatgtcggcggtaatcccggcgtgttcacaagcgaacagcttgccggtgcgtccaaagccggtggcaatctcatcggcgatcagcagtatcccttcccggtcgcacattttacgcacccgcttcagccactccggatggtacatccgcatgccgcccgccccctggacgataggttcgaggatcaccgcggcgatttcatgacgatgcgcggccatcaggcgggcaaacggcaccatatccatctcgtcccactcgccgtcaaagcggctttgcggcgcgggggcgaacaggttatccggcaggtagccctgccacaggctgtgcatcgagttctgcggatcgcagaccgacatcgctccgaaggtatccccgtgatagccgttgcggaaggtcagaaaacgacgacgtggttcgcctttagcctgccagtactgcagcgccattttcatcgccacctctaccgccactgaaccggagtcggcgaggaaaacgcactccagcgaggccggggtcatcgccaccagctgacggcatagcgctactgccggcggatgggtgatcccgccgaacatcacgtgcgacatttggtcaatttgccccttcagcgccgcattgaggcgtgggtgattgtagccgtggatcgccgcccaccaggaagacataccgtcaaccaactgttcgccgccggcgagggacagctcgcaaccgtgggcggacaccaccgggtagaccggcaggggggaagtcatagaggtgtaggggtgccagatgtggcgccgatcgaaagcgagatcgtccagtgtcataagcgacttgtaaaccattttgaaaacatttaggtttacaagtctacactgaacttacttacaatgaaacgtacacaaaatatttcgcgcagcatcgaggcggcaagcgagaacatccccaggagcatagttcactatgtgactcgggtgcgcgagtgccgccaacaaagaggctgtgtgaaataggaagtgtacgaccttttggagaggaaaatggctcaccaacctcgctggacaatgtcgcaagtaacggaattatttaataaaccgctgatcgatctgctattcgaagcgcagcaaatccatcgtcaacactttgatccgcgccaggtgcaggtcagcaccctgctgtcgatcaaaaccggcgcctgcccggaagattgtaaatattgcccgcagagcgcacgctacaaaaccggcctcgaagccgagcgcctgatggaggttgagcaggtgctggaatcagcgcgccaggcgaaaaacgccggctccacccgcttctgtatgggcgcggcgtggaaaaaccccaatgaccgcgatatgccttatctggagcagatggtgaaaggggtgaaggcgctggggctggagtcctgtatgacgctcggcaccctgaccgacagtcaggcgcagcgcctggccgaagcgggcctcgattactacaaccacaaccttgatacctcgccggaattttacggcaacatcatcaccacccgcacctaccaggagcgcctggatacgctggataaagtgcgtgatgctgggatcaaagtctgctccggcggcatcgtcgggctgggagagagcgtaaaagatcgcgccggactgctgctgcaactggctaatctgccgacgccgccggagagcgtaccgatcaacatgttggtgaaggtcaagggcacgccgctggcggataacgacgacgtcgacgctttcgatttcatccgcactatcgccatcgcgcgcatcatgatgcccacctcctacgtgcgtctctccgccggccgcgagcagatgaacgagcagacccaggcgatgtgctttatggccggggcgaactcgattttctacggctgcaagctgctgaccacgccgaacccggaagaggacaaagacctgcagctgttccgcaagctggggatcaacccgcagcagacggcggtgctggaaggcgacaatgagcagcagcagcgtctggagcaggccttactcaccccggacactgaggaatattacaacgcggcggcgctatgagctggcagcagcgaatcgatcgggcgctggacgagcggcgggcggcggaagcttttcgccgccgcctgccggtgacgcacggcgccgggcgctggctggagcgggaaggggagcgctggcttaacttctccagcaatgactatctgggcctgagtcagcatccggcgattatcgccgcctggcaacagggggccacgcgctatggcgtcggtgccggcggctcgggccacgtgagcggctatagcgaagcccaccgcgcgctggaagaggcgctcgtcgactggctgggctatccgcgcgcattgctgtttatctccggctttgccgcgaatcaggcgctgatcgccgccctcgtggagaaagacgatcggattgtcgccgaccgcctgagccacgcctctctgctggaggcggcgagcctcagcccggcccagctgcggcgctttacccacaacgatccgcagcagctcgcgcaactgctggctaagccgctggcgggcgaacagttggcggtcactgaaggcattttcagcatggacggcgacagcgcgccgctggcggccattcacgccgcgacgcaggccgcaggggcagtgttgctggtggatgacgcccacggtgttggcgtggtcggcgacgaaggacgcgggagctgcgccgcgcaggcggtgcgccctgagctgctggtggttaccttcggcaaggccttcggcgtcagcggcgcggcggtgctgtgcgacgaagcaatggccgattatctgctgcagtttgcccgtcatctgatctacagcaccgcgatgccgcccgcccaggcggtggcgttgagcgctgccctggggatcattcgcagcgatgaagggcggcagcgtcgcgacatcctggccgcccgcatccgtcagttccgtgaggggatgggcaaggtgtcgctggggttgaccgactccgtcagcgcgatccagccgctgatcgtcggcgacaacgcccgggcgctgaacctggcctgccgtctacgcgacgcgggctgctgggcaacggcgatccgtccgccgacggtgccggtcggcagcgcgcgtttgcgcctgaccctgacagccgcccatcatgctgaagacattaaccgtttactggaggtgctgcatggccacagtgaataagcaggcggtggccgcggcgtttggccgggcggccagcggctatacgcaacatgatgaactgcagcggcgctgcgccgatctactgctgcgccagctggcgcgccgcgattttgcgcaggtgctggatgccggctgcggccccggcagtatgagtcgctattggcgtgaggcgggcagcgtggtgaccgcgctggatctctccgccgggatgctcgcccaggcgcagcgtaacgacgccgcgcagcattatctgctgggggatattgaggcgctgccgctgccggacgcctgcgtcgatctggcgtggagcaatctggcggtgcagtggtgcgacgatctacgggcggcaattggcgagctgtaccgggtggcgcgtcccggcggcagagtggcgtttagcacgctgctcgccgactcgctgccggagctcaatcaggcgtggcaggccatcgacgaccggccgcatgccaaccgtttccttagcgaagcggcggtgcgcgcggcgcttagcggcctgcgcgcgaccggcgaggttcatcagattagcctgccgttcgccgatgcgttgagcgctatgcgctccctgaagggcatcggcgccacccatttgcaccaggggcggaccgccgccccgcttggccgcggcaaactgcgcgagctgcagctggcctggccgcagcggcagggcatctgcccgctgacgtattctctttttacaggagtcattgagcgtgactaaacgtttttttgtcaccggaaccgatactgaagtcggtaaaaccatcgccagcagcgccctgctgcaggcggcgaatctgctgggttttcacactgccggctataagccggtggcctccggtagcgagcttaccggcgatgggctgcgtaatgaagatgcgctggcgctgcagcgtcatagtcgggtcgcattgcgttacgaccaggtgaacccctataccttcgccgagccgacctccccgcacatcatcagcgccgacgaagggcggccgatcgccgcggccaggctctccagcgggctgcgtgagctggaaggtctcgccgactgggtgttggtggaaggcgccggcggctggtttacgccgctctcggattccctgaccttcgccgactgggcgcaggcggaacagctgccggtcattctggtggtgggcgttaagctcggctgtatcaaccacgcaatgcttaccgctcaggcggtacgccaggcgggactaccgctggcggggtggatcgccaatgacgtacagccgccgggcaagcgccacgccgaatatctggcgacgctgaaaaaccgactggccgcgccgttcctcggcgaaataccgtggcttgccgatatcgcgcagcgcgacgatctcgggcagtatctggacctcagggcgctggatccggcgttatccactgcgccagcagcggctcatccagcgccataatatcgccttcggcgacgttacggccccggtgcaagacacagaagcgatccgccacccggcggataaagggcaggtgctgctcggcgagcagcaccgtcaggccgatatcgcgatttaaccgcagcagcagatccgccagcttttgcaggcagcgcggccctctgccgcgcgagggttcatcaaggatcagcagccgcggctggacgatcagcgccctggccagcgccagctggtactgatcgtcgtcgctcagcgaggcgcctttgcgctgccgtagggcatagagctcgggaaaatgctcataaatctcgccgccgctggcgttagccccgggtttcccggccgccagggcgatgtgcaggttctcttccacgctgagttgggaaaaaatgcgtttatcttgtggcacgtagccgataccaatggcgctgcgcgattgagcggacaggggggtgagatcctgcggcggggcgccaatgtcatgccaggtcatccggccgctggccaccggcaggtggccagcaatgcagttaaccagggtggtttttcccatgccctcgcgtcccagtacgccaatgcactctcccgggcgtagtactagatcgacattccacagcgaatgctggttgccgtaaaagtgatttactgcctgtaaattcaacatggacgttttctccttatcctggcgtcagggcgacagaaagatgctgcaaaactcttgccaggaaaaagaacgctcggaaaaaagcgctaaacgccgataccatcgggcctcgtcagcgccggggctgcacttttccggtgcccgacgctaaagggtggtgcaaaaagcagcaaaaatcgagcggctttaagcggatagttatcaaaaatagttcgataaaaatttttcgccacgcggttgaccgcaaaaggcgacaggcgccgggcggcggtggtcttgggctgcggacagttatccactattcctgtggataaccttgtgtattagagttagaaaacctgcggcaagctagagcgtacgcggcttgcggctgaattggcgcgaaaggcgtcttttctttaaagatcttaaatatcagcttgttagataaaatcaatgggtgtaagaaaagcgtcatctgctgccataaaagtttaatccgtccgcttgacaaatgttaaaaggtaaaattttctggggataaccctggcggccggaggattattccgtctgacgcgcgttttgcacccagcttgctagccaataagacccttttgtggcgttatcataagtacgtactgtttaaatatccagtataatttattggcaaaaaacggtccggggggtagaattaaacaccggccgctaattcttttttcaggttctgattgatgagtaaatcgtttgtactgcattccgcctttcgcccctccggagaccaaccggaagccatccgccgcctggaagaggggctggaggatgggcttgcgcatcagacgctactgggggttaccggctccggtaaaacctttaccatcgccaacgtgattgccgacctacagcggccgacgatggtgctggcgccaaacaaaaccctggcggctcagctctacggcgagatgaaagagtttttcccggagaatgccgtcgagtatttcgtctcctactacgattactatcagccggaagcctacgttcccagctcagataccttcattgagaaggacgcctcggtaaacgaacatattgagcagatgcgtctgtcggccaccaaagcgctgctcgagcggcgcgacgtagtggtggtggcgtcagtctcggcgatctacggcctcggcgacccggacctgtatctgaaaatgatgttgcatctgacggtcggtatgctgattgaccagcgggcgatcctgcgtcgtctggccgaactgcagtatacccgcaacgatcaggccttccagcgcggcacttttcgcgtgcgcggcgaggtgatcgacgtcttcccggcggaatccgacgatatcgccctgcgcattgagctgtttgacgaagaggtcgagcgtctgtcgctattcgacccgctcaccggccacgtcgaagggacggtgccgcgctataccatttatcccaagacccactacgtaacgccgcgggagcgcatcgtccaggcgatggaagagatcaagcttgagctggcggagcggcgcaaggtgctgctggccaacaacaagctgctggaagagcagcgcttaacccagcgtacccagtttgacctcgaaatgatgaacgagctgggttactgctcgggcattgaaaactactcgcgctttctctccgggcgcggacccggcgagccgccgccgaccctgttcgactatctgccggcggatggcctgctggtgattgacgaatcccacgtcacggtgccgcagatcggcggtatgtaccggggcgaccgggcgcgcaaagagacgctggtggaatacggtttccgcctgccgtcggcgctggataaccggccgatgaagtttgaagaattcgaagcgctggcgccgcaaaccatctatgtgtcggcgactccgggcgcctatgagctggataaatccggcggcgaggttgtggatcaggtggtgcggccgaccggtctgcttgacccaatcatcgaagtgcgcccggtggcgactcaggtcgacgatctgctgtcagagatccgcctgcgcacggccatcaacgagcgcgtgctggtcaccactctcaccaagcggatggcggaggacttaaccgagtaccttgaggagcacggcgagcgcgtgcgctatctgcactcggatatcgacaccgtcgagcgcatggaaatcatccgcgacctgcgtcttggcgagtttgacgtgctggtggggatcaacctgctgcgtgaggggctggatatgcctgaggtgtcgttggtggcgatcctggatgcggataaagagggcttcctgcgttctgaacgctcgctgatccagaccatcggccgcgcggcgcgcaacgtcaacggcaaggccatcctctacggcgataagatcaccccctccatggccaaagccattggcgagaccgagcgtcgacgggagaaacagcagcgctacaacgaagagcacggcatcgtgccgcaggggctcaataagaaagtggtggatatcctgcagctgggccagggcctggcgaaaaccaaagccaaagggcgcggtaaagcgaaggccgttgagcctgccgggcttagcgctgtggatatgacgccaaaagcgctgcagcagaaaatccacgagctggaagggcagatgatgcagcacgcgcagaacctcgagtttgaggaggcggcgcaaatacgcgaccagctgcatcagctacgcgagctgtttatcgccgcctcctgattctgggcgcagactggcggagtggacgtgcggggtatagtgaaggcgcgcttctcttatcgtcctgcttgccagataacaaacatttgagaagaaaaaaggccgcgttgcggccttcttaatgtttgcttaatctcgccaggcgacactatcttcaacctgatgaggatagcgcccatgcaaaaaattaacttccgtgaatatctggcggtcgccaccgccctggtcattattgttgccttcttccatcaatgggtgctgacgttctgacccccgcgctgcgggaatagcacccacgcgcggacccctggccctggctgtcggttatgcaaaaaaaactgggcgtcatgcagctgagcgatgcgcgtgacgatgctcagtccgaggccaatgccgccgtagcgactgtccatgcgcacgaaggctttactgagttcgccgcttttcgcctcatcgatccccggcccttcatcttccaccgccatcaccggcatcaggcccgctttcaccgacacgcggatcgtcgacccttcagggctgtagcggtgagcattctccaccagattgcgcaggatcacgccgattaacgtcgcatcgccagagacgacggcctcgttttcgatatccgtcagcagcagccgctgctgacgctgcgccagcatagcctccagttcgtcctgcagcggttttaccacgtcatccagcaacagcacctgctggtagctgccggcggagaaggactggccgacgcgcgccagctgcagcagctgggaaatgctggtggtcatctgatcgagacgctggatcagcgggtcgacgcccatgccatgcactttcgccagcagctcaaggtgcagccgcagcccggccagcggggtgcgtagctcatgcgccacgtcggcggtaaacagccgctcgcggtcgagggtcagattgaggcgggaaaccaactgattcagggcggtggtcaccgccgtgacttcgggcaccgattcgctgagtacgataggagtgaggttgtccggcgtgcggttctccagttcgctttgcagtcgtgaaagcgggcgggtgatcttgcgcaccgccagcatgctgatatacagcgccaggccaacgatcagcaggctcggcaccagcaggctggcaaccgcttcccgtacctcatgctccacatgtttctggttgttgtgcccttcgatggcgctggccaccagcagctggatctgctctttgctctcatgccatagccagaagacgcttatcagctggcagaccaccaggatggcgccgatggtcagcagcagccggtggcgcatggtccaggtttcagttgcaaacagagccatggtctattccgtgtcgatgttgttagccagcatatagccaaagccccggacggtgcggatccgcgatttgccaatcttttcgcgtaggttgtgaatatgcacttccagggtattggtcgccggctcgttgtcccagctgtaaatgtcgttgtagaggatctcgcgatgcaccgggctaccggctttcatcatcagccgcgacagcagggcatactctttcggcgtaagatccagcgccgtttcacccagccacaccaggcggcgagtgacgttaaggcgcagattgccgacgctgatttcattatcgccctggttgttatgccggcggagcagggcgcgaatgcgcgcattgagttcctccagggcaaagggttttaccaggtagtcatccgccccggtatcgagaccgctaatgcgatcctcaagcgtatcgcgggcggtgaggatcagcaccggctgggtcattttctcccgccgcatgcgggagagaaaatgcagcccgtcttcatccggcaggccgagatccagcacgatcaggctgtaatgattgctggccagcgatagcgcggcttcgtgcgcggtggagacgccgtcgcacacgtatccttcactttgcatcgccagaattaacccctgcaacagcagcgcatcgtcttcaatgactaagattttcatcaaccagcctctctacatggcgttaagatatcatctgccgcctggtactcgcgggtgctgacgccgagcaggccgagcagggtggagaacagattatcctgcgagtaattctctttttgcgcccgctgctgcagacagtgcgcggaaatgccgtagcgctgctggtagtcggcggagagccacagcgccatcggcacatgtttctgcgtatccggcgcgatggaatacggtagaccatgcaaatagacgccatcttctcccagcgattcgccgtggtcggacaaataaaccaggctagtggtaaatttatcctgtttagattgcagtagttttatcgctttatcaacgacatagtcgacataaaggatggtgttgtcataggtattggtcaactgctcccgggtacagccctggatctcattggtgtcgcaggtcggcgtgaatttgcgaaacgccgctggatagcgattgtagtacgtcggaccgtggctgccgatggtatgcagcacaataatgccatcctgttgcaggttatcgatatagctgtcgagattatggaacaggacgtcatcgtagcactcgccatcgatgcactgcccggtgagcttcaggtcggtgacgttctggtgtggtacccggtcgcaggcgcctttgcagccgccgtcattatcgttccacagcacccggatccctgcgcgctgtagaatatccaggacgccttcctgatggtgcgccagctcttcatcataatgtgcgcgcggcatattggagaacatgcacggcacggaaactgcggttgccgtgccgcaggaagtggtatgcggaaaatagatcacgccgtcctgccgcatcagcgggttggtgtcgcgcgaatagccgcccagtgagaagttatccgctcgcgaagtctcgccgagcacgacgatcgtcaggttcttacggggagcgttatgcatcaccgctttctgcgtggcatcttcgccaatcttcaccagcggcaggttgtccatccgatgatgagcataccaggagttcacggccacaatgctgttggaagggctcagggatttcaccagctctttgttgttacggaacaccgaggcgtaatctttgtagaacagcgcggccaccagaataatcagcagcgccgaaacggcgatattgagcaggcgcatcgccgcgccgcgccaccgcgtggcgggcttacggattttcacccaccaggcgacgaataccgccaaaaccccggaaaggccgaggacggcaatcatttcgccggagagtagagcaaagctttccgccggagtggtgtcgaggatattggtgatcatgctgcggtcgatcaccacgccaaagttccagatgaagtattgcgccgaggcgctgagcagaatgaacaggctaatcaccagccggtccagcttcaggaacgaggcgagagtggtgaggatattcatcacgctaatggccacgatcggcatactgagaaataccagccagttatgcaggctatttaccggcagtaacgggaaaacctggcgataaaaagccaggttgagaaagatgccgatatagcaagcaaagagaatcagataagtcgtgcgactgaccaccggccgacgcagaggcaataacgacataatgcacacccacagaaaaagatgagggtatagtgccagccctattttaagacaaccttaagattttaaggtgcgccgaagagggccgcctccggcgcgcaggatcagcccggcagctggatcgctttctccagcgccccgcggagcagcgcccggtcatgacgatagggaacgtcgctggcctccagcggcgtctggatcaccaaccggtcgtcaatgccgctgatatcggcttttggaccggcgatcaccgcatccaccacccgcttgcctacatagcgctccataatcgcgatgcgctccgccagcgacagcctcgcggccgggctatgctctttgccgaggttatcgataaaaaccatcggcgccggggtgcggcgcaacgcccgggccatctcgtcgagcaacaggatcggcagcaggctggtgtaaaaactgcccggcccaatgaggatcaaatcggcttcggcgatagcctccaccgcctcgcgggtggccggtaccggcggggtgagcatcagctcctgcggcacattatcaagctgatcaatattcacttcgccataaacttcatggccttcatgatcgagcgccatcaaatccaccggttgttctgacatcgggatcaggaaagcgtccactttcagcaggtttctgatcaaattgatcgcctctaacggccgcacgctcaggtgatccagcgcctttaacatcaaatttccgaggttatgcccggaaagctcgccgttaccgccaaaacgatactcaaacatcgccgacgctacgctcggctcggcaattaactgattgatgcaattgcgcatatcgccccaggcaatgccaccttccgaacgacggatccgcccggtggaacccccgttatcggtggtggtgacaatgccggtcagccgtgagccgagcgaggagagggaggacatcacccggcccaaaccatgcccgccgccgagcgcgaccacccgatcgaggtcagcgaatgtacgattgcgcatagaaattccttatttcacataaacggccacacactacccgatctacccctaaaagacgatgggaggagcccgacaaactgaccgacatcaaggcaaaaaaatgatttatggctattctgtagcgaaaatgcacgaagatagcgatatgtataagattatatagcgaaatcgccaatggcgaaactgcctgtaacgcgctactatcgacataacctgttaacactctagcctcttcgcctgtgtcaaaagatatggcgatttggccgcgacgccgccggttgtcgccagggcgtggaaagaaatgaccgcgtctcccgtatttggaaaggtgtatatggcctcacagcttaccgatgcattcgcgcgtaagttttattacctgcgtctgtcgattaccgatgtgtgcaacttccgttgcacctactgcctgccgaacggttataagcccggcgccgtcaataacaatggctttctcagcgtagacgaagtacgccgggttacgcgcgctttctctgcgctgggcaccgaaaaagttcgcctcaccggtggggaaccctccctgcgccgcgacttcaccgagattattgccgccgtgcgtgaaaacccggcgatccgtcagattgcggtcactaccaacggttaccgcctggcgcgcgatgtcgaacgctggcgcgatgccggcctgacggcgattaacgtcagcgttgatagcctcgacgcccgccagttccatgccatcaccggccaggacaagttccaccaggtgatggacggcattgacgccgccttcgccgccggctttgacaaggtaaaggtgaataccgtgctgatgcgtgatgttaaccatcaccagctcgataccttcctcgcctggatccaaccccgtcgtatccagctgcgctttattgagctgatggaaaccggtgaaggcagcgacctgttccgccgtcaccatctctccggcatggtgctgcgcgatgaactgctgcgccgcggctggatccatcagatccgccagcgcagcgatggcccggcgcaggtcttttgtcacccggactacgccggcgagatcggcctcatcatgccgtatgaaaaagacttctgcgccacctgcaatcggctgcgcgtctcgtccgttggcaaactgcacctgtgcctgtttggcgaaggcggcgtcgacctgcgcgacctgatggccgaagaccagcagcaggccgcgcttgaggcgcggatcgccgaagccttaacccataaaaagcagacccatttcctgcatcagggcaacaccggtattacgcagaacctgtcctatattggcggttaatcgttttcgaaaggagcattcagatgagccaggctagcgctgagtttatcccgacccgtattgctattcttaccgtttccagccgtcgcggcgaagaggacgacacttccggtcactggctgcgcgaggcggcgcaggaggcggggcaccaagtcgtcgagaaggcgatcgtcaaagagaatcgctacgccatccgcgctcaggtatcggcgtggatagccagcgataacgtgcaggtggtgctgatcaccggcggcaccggttttaccgacggcgatcaggcgccggaagcgctgctgccgctgtttgatcgtgaggtcgaaggctttggcgaagtgttccgcatgctgtccttcgaagagatcggcacttcgacgttgcagtcccgggccgtggccggcgtcgccaatcgcacgctgattttcgccatgccgggctcaaccaaagcctgccgtacggcgtgggacaacatcatcgccccgcagcttgatgcccgcacccgtccctgtaacttcattccacacctgaagaaataatctatgtcacaactgacccatattaacgccgcgggtgaagcccatatggtcgatgtctccggcaaagcggaaacggtgcgcgaagcgcgcgccgaggcttacgttgaaatgcaggcgacgaccctggcgatgattatcgacggcagccaccataaaggcgacgtgtttgccaccgcgcgtatcgccgggatccaggcggccaaacgcacctgggagctgatcccgctgtgtcatccgctgatgctcagcaaagtggaagtcaatctgcaggcgcagccggaacataaccgggtgcgcattgaatcgctctgccgactcaccgggaaaaccggcgttgagatggaagcattgaccgccgcctcggttgccgcgctgaccatttacgatatgtgcaaagcggtgcagaaggatatggtgattggcccagtgcgcctgctggcgaaaagcggcggcaagtccggcgattttaaggtgggtgaatgccatgattaaggttctgttttttgcccaggtgcgcgagctggtcggtaccgattcgctgacccttgatgccagcgaactggcgactgtcgaagcggttcgtcagcagcttgccgcccgcggcgatcgctgggcgctggccctggaggagggcaagctgctggcggcggttaaccagacgctaacctctttcgaacatccagtggccagcggcgacgaagtggcgttcttcccaccggtaacggggggctgacatgacgcaaacccgtatcgtggtcagcccggcgcgctttagcgtcagtgaggaatatccctggctggcggaacgcgatgaagacggcgcggtggtcaccttcaccggtaaagtgcgtaaccacaacctcggcgacagcgtgaaggcgctgaccctcgagcactatccggggatgactgaaaaatcgctggcggaaattgtcgagctggcgcgcgagcgctggccgctgggccgggtgacggttatccatcgcatcggcgaaatgtggccgggggaagagattgtgtttgtcggcgtcaccagcgctcaccgcggcagcgccttcgccgccggcgagtttattatggattacctgaaaacccgcgcgccgttctggaagcgtgaagcgacgccggatggcgaacgctgggtcgacgcccgcgacagcgatcgccaggcggcagagcgctggtagtgtgatacgcttacagggtgaaactttgttaatcaggagagagtcatggacagatatccgcgttccgattcaatagtgcagggccgtaccggcctgcagacttacatggcgcaggtgtacggctggatgacggtcggcctgctgctgacggcgtttatcgcgtggtttgcagcgaatactccggcggtgatgatgttcgtcttttcgagcaaaatcactttcttcgggctgattattgcccagctggcgctggtgtttgtgctgtcgggaatggtgcagcggctgagcgccgggatggccaccacgctgtttatgctctattcggcgctgaccggactgacgctatcgagcatttttatcgcctatacctattcctcgatcgccagcacctttgtggtcaccggcgggatgtttggggcgatgagcctgtatggttacaccacgaagcgcgatctgagcggcttcggcagcatgctgtttatggggctgattggcatcgtgctggcgtcgctggtcaacctgtggctgaagagcgaggcgctgatgtgggccgtgacctatattggggtggtgctgtttgtcggtctgacggcgtatgacacccagaagctgaaaaacatcggcgagcagattgatacccgcgacagcgccacgctgcgtaaatactcgatccttggcgccttaacgctgtatctggacttcatcaacctgttcctgatgctgctgcgtattatgggcaaccgccgctaacctctttatatcacagggttgcatctccgaacgcccggcaagcgtagcgccgccgggcgagatttcaggcacggtacccttgattttgccgggtggcggctgcgccttacccggcctacaggatcctctcacaggctcacactccgtaggcccgcgcaagcgtagcgccgccgggcgagatttcaggcacggtactcttgatgttgccgggcggcggctacgccttacccggcctacaggatcctctcacaggctcacactccgtaggcccgcgcaagcgcagcgccgccgggcgatggcatcaggcacggtacccgtggtgctgccgggcggcggctgcgccttacccggcctacaggctcctctcacaggctcacaccccgtaggcccgtgcaagcgcagcgcggcctgaccgtttcattcgcgggccagcttgcgctggttcttttgccgcagctttttcgcccggctctccagcagcagataggccaccgtcgccagcagcaatggcaggaaataatagagcgcgcgccaggcgagcagggcggcaatgatcgcgcccttcgaaatatcttccccggagagcatggcgataaacaccgcctccagcacgccgatcccagccggaatatggataatcaccccggcgatactgctcaccagcagcacccctaataccagaaaatagttaatctcgctgcccaacagcagccagattatcgcccccatcgccatccagttcgccgccgagagccccatctgcagcagcgcgaagcgccaggagggcagcaccagccgctggcctttaatcgtcaggtgacggcgtttggcgaacgcgcagccgaacagatagcaaagcgtaaggatcagcatcaccccgccgataatgcgcagagtggtctggctgatgtaccagtgcggcggcagcttcaccagatctgccgtgaatatcaccccgcccagcagaatatagcccaaccagttggtggtaatgcttaaggaaaaaatacgggtgatggtgctgccgttcagccccagccgcgagtacagccggtagcgcataccgatcccgccgacccaggtgctgagtgtcaggttaaaggcgtagcagataaacgacaccagcatgacctggcgtttcgccagcttgtgcccgcaataggcccgaccgagcagatcgtagcagccgtaaatgaggtagctgacgataaccagcgcaatggcgctaaacaaggccagccgatcgtagccgcggatcaccttccacacgtcctgccagtcgactttttgcgcgtagatcaccaacaggacgatgacggcgataaaaaagagcacggtcagcactcttttcgccatccgccagcggggatgtgatttgctcatagtggattatccctggctggagactcgacgcggtcctgagtttcaatttccggctggaccggcgggctgactctggccagccgcggggtatgagccggtaaccagccgacccatgccgggaagtggcgcagaaagtggaaagccatcacgctgacgcccagccgccaccagttgcgtttcggcagcatcgttttatcgatccgctggcaatcccgggcgataagcccgttgagattatcgcgcagcgtctggttaaacacccgatcgtggatgatcagattggcttccagattcagcgacaggctgagcggatccaggttgcttgacccaacggtggcccagtggtcgtctgccagagcgaccttgccatgcagcgggcgacggcgatattcgtaaatctgcaccccgcccttaacgagatagtgatagagcaggtgggcgccaaacttcacaatgggaatatccggttcgccctgcacgatcagcttaacccgtactccgcgccgcgcggcattgcgcatcgcatgcagcaggcggtagccggggaaaaaataggcgttagcgataatcacttcccggcgggcgctggtcagcatcttcagatagtggcgttcaatatcgtcgcggtgatcctggttgtcgcgccagacgaacagcgcctgcgcctcgccgggggtctggttaatctccggctggtggcgacgacgtcgccaccagcggcgggcggtttcgctgttgggcaggttttccagctcgaactgcaggatgtcgagcaccaccggcccttcgacctgcaccgcataatcctgcttcgcctccggaccgtagtcgctcatatgttcggcggagtagttaataccgccgacaaaggcggtggtgtcgtcgattaccacgattttacggtgcatgcgacggaacagattggtgcgcatccccatcagcttaggacgcggatcgtagtagcggaaaatcacgccagcggcggtgagctcgccgacaaattcatcgctgagatccggggaaccatagccgtcgaggagcacctccacctggatgccgcggcgggcagcctcgagcaggaccgcgtgcagccgccggcctacctcatcttcaaaccagataaaggattcgaggatcacccgccggctggcgcgaccgatggccgcaaacagcgccggatagtactggtcgccattctccagtagcgtaatgcggttgccttcctgccaacgacatttcacaaatgtatctccacgctaaggggtgcatgatcggacagatgccgccaatgtttaagggccagcgccttcgggcgactggcgtgggcgttcttgacgtaaatgcggtcgaggcgcaacagcggaaaactgaccggaaaggtgcgcgccggccgtccgcgggcgcgggtaaagatctcttccagcccggcctgggcttttaacggctggttagcctgctgacgccagtcgttaaaatcgccagccaccaccaccggctcgcccgcgggcagggtattgacccactccgccagcatggtcaactgcgcctgccgttggtcggcgcgtagaccgagatggacgcaaatcacgtgaatagttatcccgctccgcggcggcacgatgcggcagtacagcaggccgcgcttctccccgttgccgaccgagatatcgcgattttcgtagtattcaatgggaaagcgcgacagcacggcgttgccgtggtggccttccggataaaccgcattgcgcccgtaggcgtagtcgctccacatggtgtcggcgagaaattcataatgggtcgtatccggccagttttcgatgtgcagcggatgtacctcatgagcgcccatcacctcctgcaggcaaacaatatccgcgctaacgctgcgcacggcgtcgcgcagttcgggcaaaataaaacgccgattaaacgccgtaaagcctttatgggtgttaattgtcagcacgttcaacgaaaatcccgccgttggctcagccataattctccagtaaatgtcactttcctgaataaaatagtgtagtagacgtcacaaaaagatgcggtgttacggaattttccgtaaagtgcggtactctgagtagcagagaaaaatccttcaggagagaagccatgaagtggcaacaacgtgtacgcgtcgcaacgggtcttagttgctggcagattatgttgcatctactggtcgtggcagtactggtgatgggttggattagcggcgcgctggtgcgcgtcggattgggactgtgcgtcctctacagcgtcacgctgctggcgatgctgtttttacagcgtcaccatgaggcgcgctggcgcgatgtgggagacttccttgaggagctcaccacgacctggtacttcggcgcggccatgatagcgctgtggctgctgtcgcgcgtgctgcacaacaacctgctgctggccctcgccgggctggtgatactggcaggcccggcggtggtctcgctgctggcgaaagataagagccgttaccctaaagcgttcgggctacaacaaggcggcaacgcagcgaatccccagaagcatagataactatgcgactggggtgagtaaggaaagccaacgccgttgtagtttgaacgatgacgggtattacgcaatcttccttcggaacatcgcatacgccgctgagccggtggtggccgctatgaccagtagcggccacaaacttccccacacaatctccagactcgcatccttcagataaatttgcttggtgatatcggtaaagtggcggatgggatttatccaggtcagattctgcagccactgcggcatgttttccactggtgagacgtaccccgacaggagaatagccggcatcataaagacgaacacgccgataaacgcctgctgctgggtggcgcacagcgacgaaatcaataagccaaagcccaccagcgatagaccgtaaatcaccatggtgaaatagaacagcagcagcgagccggcaaacgggatctgataggcccagataccaatcgccagcacgatagttgcctgcagggtggcgacgatcagcgccggcaccgccttgccgacgaaaatttgccaggtggcgaggggggagaccagcagctggtcaagggtgccctgctcgcgctcgcgagccaccgacagcgaggtgacgatcatcaccccgatggtagtgatcatggcgataagcgacggcaccacgaaccatttatagtcgagattcgggttgtaccagttgcgcaccaccagctcgctgttgttcggcttcgctttaccctccagcagctcctgctgatagtttttcacaatctgttgcagatagttggcggcgatttgcgcgctgttggagttgcgtccgtcgagcagaagctgcagcggggcggtttgatagttatccagattgcgcgagaaatcggccgggaagcgcaccaccagcagagctttttgttcatcgatggtcggctggatcgcctgcgggctttgcagcagcaggacgtgggtaaaggctttggcgcgggcaaagcgctgagtgagttccaccgcgtggcgaccgctgtcctcgttgtagatagcgatggtggcgttggtcacctccagcgtcgcggcaaagggaaaaagcagcacctgaatcagcaccggcatgattaaaatcgcccgcgtctgcggctcgcgcagcagcgactgcagctctttgcggattaatgtccataaacggtgaaacataatagctcctttggcccattcaaccacgccgggcggcactgcgtttgcccggcctacgggatcggcgaaccgtataatcgatgttggttaaaccgtaggcccggtcggcgcagcgccaccggacaaaacctaatccagacgccgtttggttttcagccacgtcagaccgataaacatcaccgccgacgcaatcaaaaacagcacgttgaccagcagcaccaccggaatattgcccgccagaaacaggctttgcagagtactaacgaaatagcgcgccgggatcacataggtcaccgcgcggatcaccgccggcatactgtctatctggaaaataaacccggacagcataatcgacggtaaaaaggcggcgttcagcgccacctgcgcggcgttaaactggttgcgggtaatggttgagatcagcagccccatccccagggtgctgagcaaaaacagactggtaatgacaaacaggatcggcagcgagccgcgatagggcacgccgagaataaataccgacaccagcatacacaacagcatcgccagcatgccgaggaaatagtagggaatgagcttgcacagcagcagttcggcgcgggtgatctccgtcgacagcagcgcctccatggtgccgcgctcccattcgcgggccaccaccagcgaggtcagtatggcgccgaccacggtcatgatgatggtgatcgccccggggataataaagtgctggctaatagccgccgggttaaaccagtagcgcatctgcacgtcgatcagcggttcaaaggtttcgccgcggtcttccgcccgctgctgctgccagatttgccaaataccttccacatagccctgagcgaagttggcggtattgggctcgctgccgtcggtgatgagctgcagcggtgcgtcggcgccggggcgggccatctggcggtcgaaatccaccggaatgaccaccatggcgcggatgcgcccggcctgcatcatctcaatcagctgcctgcggctgtcgctgacggtggcgtcgatatagggcgagccggtcatggtatggacgaaatccagcgcctcttcgctctgctgctcaagcaataccccgacccgcagcctgctggagtcgaggttaatgccgtagccgaagataaacagcagcagcagggggatcaccaccgcgatcagccaactgctgggatcgcgcacaatctgccgggtctctttgacgcacagggcgcggacccgccgccaggagagaatgctattgcccatggctattctccttgtcccagcggttaatcagggtaataaacgcctgctccatggttgggtccgtctggctgtcgtccgccgcctgggccttcagcgcgtccggggtcccgctggcgataagtttgccgtgatagaccagcccgatgcggtcgcagtattccgcctcatccatgaagtgggtggtgaccattaccgtcacgcctttatcaaccatgctattaatatgtagccagaactcgcggcgggtaaggggatcgacgccggaggtgggttcatcgagaaacagaatatcgggttcatgcatcagggagcaggccagcgccagccgctgcttgtagccgagcggcagctcgtcggcggcgtggcgggcgatacttttcaggccaaaggcatcgctcatccgggcgattttttcattttgcgcccggccgcgcaggccatagacgccggagaaaaagcgcaggttttgctcgacgctgaggttgccgtacagcgaaaatttttgcgccatatagcccagatgctggcgcgccttgccagagctgaccttgagatccattcccagcaccagcgctttgccggaggtgggcaccagcaggccgcacatcattttgaaggtggtggatttcccggcgccgttggggccgagcaggccgaaaatttcaccgcgcttaacctggaaatcgacatggtcggtagcggcgaaatcaccaaactttttcgttaacgactgggcttcaatgaccgtttcctctttgctgccgtcaacgcgatggataatcgcccccaacggcgattcagcggtcccggcgccgccgagcaggtcgataaacgcatcttcaaagcgcggtgcggtgtcggccacctgcaggggcggcatgtcgccatgctgctggacttcctcaatgcgcgcgtcctttttcaggatcagacgcaccgatttgccctggatcaccccgtcgctaacctgcggcagcttcagcgcccgctgcagcaggcggcggttgttttcctgcgggctggaaaccagaaagctgcgcccggccatggtttgcgtcagcgccgtcggctcgccctggtagagcagtttgccttcgttcatcagcagcacatcgcgacactgctcggcttcatcgagataggaggtgctccacaggatcagcatgccgtcgccggccagctcgtgcaccatctgccatagctcgcggcgcgagatagggtcgacgccgacgccgggctcatcgagcagcagtactttcggatcgcccaccagggtacaggcgaggcccagcttttgcttcatcccgccggaaagcttgcctgccagccgttcggtgaatggaccaagggaggtgaactccagcaggcggtcgaaaattttcttccgcgcctcgccggtgacgctgcgcaggtcggcgtacagggtcaggttttccatcaccgtcagatcttcatacaggccgaacttctgtggcatatagccgagcaccgcgtgcagggcgctgtcgtcttttagcgggtcgaagcctatcacgctggcgcgaccctcatcaggcttgagcaatccggcgagcattcgcatcagggtggttttccccgcgccgtcgggccccaccagcccggtgacgtagccggcgcggatcgtacaggtgagcggcgctaccgctggcctgtccataccgggaaaacggcggctcaggccgtttaaggcgatgacggtctcactcatgtccgttcccgtggctaaaggagatggtcaccggcattccctggcgcagcgcgccgtcggcatcagtcaccacaatgcgcagacggtagaccagatcggtgcgcagatccggggtctcgacggtcttcggcgtgaattcagcgctcggcgagacaaaaccgattttgccgtgatagggcttatccggccggctgtcggtatagagcagcacttcttgtcccggctgcgcctggccgaggtttttctcgtcaacataggcgcggacccacaccggatgcgttaacgacagggtcagtacggtaccgccggcgttgagcatagtgccgggctcgacggcgcgggtcatcagcgtaccgtcagaaggggcggtgagcacggtatcgtgcaggtccagtttggcctgggccagcgccgcctgcgcctgttccagactggctttggcctgggcaatctcctgcgggcggttaccggcgcgatactgacgcagcttatcctgcgccgatttgagcgttgcctgcgcctgatcgcgcgaggagcgggcattctccagatcgttggcggaaatggcgctgctggcgcgcagcccgagctggcgctgataaaagttttgcgcatagtcgtaagcggcctgcgcctgtttcaccgccgccgcggcctgggcaatctcttccgcgcggtagccggccatcatcaggtcatactgcgcctgggcggtggagacattggcctgggcctgcagcagggcattttcatacggcgcgcggtcaagctcgccgagagtttgcccggcgcggatgctgtcgccttcgtcgacggtcagcgaggccagcctaccgccaacgcggaagctcatgttgacggtgcggatatcgacattgccatacagggtcagcggctgctgccggctgctctggtaccaccaccagccgccgcccagcgcggcgagaagaattacgatcagcagaatgacgacgacgggttttttcatcagcccaaactcctttgcgataacccatgcaggatgaaatcgatatgacaggtaatgacttcgaaaatctgttccgttttttgcgcgtcaaactgcgtccagccggtgcgcagcaggatagtttcacgcccgagacggaaagcgagcacctcgcccagcagggcgtgggtatggaggatcatttgcgtatcactggcttcgcagccggtccaggcggcaatcagccgggtgagataatggtgcaggggggcaatcacctgctggtggatcagatggtaggcggcggtcggcgccagctgctcacgggaaatgaatttgcttaggttaaccgtatcgtcctgggtgagcagcaggatcatgttgtggcaggcgctaaggatgaggtcgcggatcgcctggcgatccggcgcttccccggcaagcaggtgctccgccgcttcggcctgcgggcgaaaattgtcgccgataaaatcggcgatccactgggcgcaggcaagatacagatcgtctttcgagccaaaataataggtgatagcggcgatattctgcccggcctgggcggcgatatcgcgggtggtggcgtgctggccgtactcgccaaactgggcgatagcggccgcgataagctgattttttgcctgttcgcctttactggtcatcgcgctcggtaaaaattaatcaatcgattgattaactttaggcgccgactggcggtttgtccaccagccgggatcaaatatggaacccttcctctttcagctctccggcgacccaggcgaagaagcgctggaccttctccttctgttcattagcgtgggggaggacgaagtggtgcgcgccgaccggcatgctccgctcgtcggcaaataccggcgtcagctgcccctggcgcacgtgtccgccggccagcagattgctctcgaggatcacgcccatccccattctggccgcctcgatgctcatatatgaccggtcgaaattaaaaatgaagtttttatgccagccgcggaccttgtgccacgacagccagttgctccagttaatcaaggtgctgtcggagtggatcagatcgcaggccagcagatcttccacaacctgcacaggatggcaggctaaataagacgctgcgctgtagggcaggacgcgctcatttttaatggttctgaccagcagcgtcggccactgtgacagcccgtgacgaatatcgatatcaatattatcccgggagaactggatgctttcgtatgaacaggtcaggctgatttttaacgccggccacgcctggcggaatttatccagacggggcatcagccatagcaggccgaagctcggcgccgaatgaatgcgtaaataatcctgatggatatcgttgatcacctggctggtggcctggccaatcatatttagcgccccggagacctctttgagatatttttctcccaccgccgttaacgtgacgcctttgctgctgcgggagaacagttttttccccagaaagtgctccaggctagctatctgatggctgaccgccgaggcggtaatattgagattctctgcggccaggttaaggctgccggtagcggcgacttcaataaaagcctggatattgcgtaaagagggcatcggcagatttttattgggtagcggttggctcatggcggcatcctgcgcggggcgcgaataaaagaaaatagcgaacagcgtggcgcagccgggatgtacagcatagggaaaagcgaaaaaacaacgttaatttgtgatgggcttaacaatttatcttgttaaaagcgcgcaggtcagtaaacgctaaaaatttgcgggaagtcactaactcaatttttctcaatcataattgaggttttttgaataccgtttcattttggggttgttatattcctctcacaggcctgataacaaactgcgatgctcttgcatcgcaattataaaacacctaaccacctgtttcgctggcgaaaagcatttatctcttgctcctgtatggatagtaaaacgcggtgatccgaagcggcagcttacagcgaagtggatgaggtataaaacgaggaaaccctatgtcacgtatagatacgctggtctgtactgacgccaggaaaacgaaatatcgtttcgtggttttgacgatgatttttctggtgtatgccatcaattacgccgaccgaacgaatattggcgcggtactgcctttcatcattgatgagtttcatatcaataattttgaagccggggccatcgccagtatgtttttcctcggctatgcggtaagccagatcccggccggctttttcatcgccaaacgcggtacccgggggctggtatcgctctccattttcggcttctccgcctttacctggctgatgggcacggtgagctcggtgtttggcctgaagctggtgcggctgggactggggctgagcgaagggccttgcccggtggggctggcttccaccataaataactggtttccaccaaaagagaaagccacagcaaccggcgtttacatcgcggcgaccatgtttgcgccgattattgtgccgccgctggcggtgtggattgcggtaacctggggctggcggtgggtctttttctcttttgctatacccggaattgtggcggccatcgcgtggtatctgctggtcaaatccaagcctgctgagagcggatttgtttcccaaagcgaactggcagagattaatgccgggcgtgaaagtcataataatagcgtacgcgaaaatatcttaattgccgaaagatttacctggctggataaaatcattcgggtaaagaagatggcgccaattgatacggcgaaaggcttattcacctcaaaaaatattctcggtgactgcctggcgtattttatgatggttagcgtgctgtacggattattaacctggatccccctgtatttagtgaaagagcgcggtttcgatgtaatgagtatgggcttcgtggccagtatgccgtgcatcggcggctttattggcgcgatcggcggcggatgggtttcggataagctattaggccgccggcgtaaacccaccatgatgttcactgcggtgtcaacggtggtcatgatgctaattatgctgaatatcccggccagcaccctggcagtttgtattggattattctttgtcggcttttgtttaaatatcggctggccagcctttaccgcgtacggtatggccgtttcggatagcaaaacctatccaatcgcctcttccataattaatagcggcggcaacctcggtggatttgtcgcgccgatggcggctggtttcttgcttgataaaaccgggagttttaattctgtatttacctattttggtatctgcgccgccattggtttggtggtgattcttttcctcgatgaaccacaataacggaaatatatcctgttaattaatatgacgtaatgtcatggagtgaaactatgttattaaaagataaagtcgccattattactggcgcggcctccgcacgcggtttgggcttcgcgactgcgaaattattcgccgaaaacggcgcgaaagtggtcattatcgacctcaatggcgaagccagtaaaaccgccgcggcggcattaggcgaaggccatctcggcctggcagccaacgtcgctgatgaagtgcaggtgcaggcggccatcgaacagatcctggcgaaatacggtcgggttgatgtactggtcaataacgccgggattacccagccgctgaagctgatggatatcaagcgcgccaactatgacgcggttcttgatgttagcctgcgcggtacgctgctgatgtcgcaggcggttatccccaccatgcgggcgcaaaaatccggcagcatcgtctgcatctcgtccgtctccgcccagcgcggcggcggtatctttggcggaccgcactacagcgcggcaaaagccggggtgctgggtctggcgcgggcgatggcgcgcgagcttggcccggataacgtccgcgttaactgcatcaccccggggctgattcagaccgacattaccgccggcaagctgactgatgacatgacggccaacattcttgccggcattccgatgaaccgccttggcgacgcgatagacatcgcgcgcgccgcgctgttcctcggcagcgatctttcctcctactccaccggcatcaccctggacgtcaacggcggcatgttaattcactaagcgaggcaaacagatgaagatgaccgaatcacaaaaagtcgccgcggcggcgtggcgtattcgccgttacgccctgcaaatgggggaagtgcaggggcagggctatatcggccaggcgctgggctatgccgatgtgctcgccaccgccttcagccatgccatgacctatcgcccggaagatcccgagtgggaggggcgcgatcgcttcctgctctctcatggccattacgctatcgcttattatgccgcgctgctggaggcgggcattatcccggaagccgaactggaaacctacggctccgacgacagccgcctgccgatgtccggcatggcgacctacaccccggggatggagatgtccggcggctcgctggggcaggggctgtccattgccgtcggcatggcgcttgggctgcggcagaaacagagcaaggcctgggtctacaactccatgtccgatggggagctggacgaagggtcgacctgggaggcagcgatgtcggcggctcactatggcctgagcaacctgattaaccttgtcgatgtcaacaaacagcaggctgacggcgattcacgcaaaatcctcggctttgagccgctgcaggataaatgggccgccttcggctggtacgtacagcgcgtggacggtaacgatctgccggcggtgatggccgcctttgacaacgcgaaaagttattccggcaatcagccgcgggtcattttatgcgacacgctgatgggcaaaggggtgccgttcctcgaaacccgcgataaaaaccattttattcgcgtcgatgccgacgaatggcaaaaagcgatcgcggtgctggacgctaacaaaccggaaggagtgctgtaatgagccagagtcaaccccgtttaaaaacgtcggcgatgatcgcctcgattgctgatgaaggccaggcgaccgtccctgcgcccttcggcgtcgcgctgtcaaaactggcggcgcagcgcccggaaatcgtcggcatgaccgcggacctgtcaaaatataccgatctgcatattttcgcccaggccttcccggatcgctttttccagatgggcatggccgaacagctgctgatggcggcggcaggggggatggcgaaggagggatttattcctttcgccaccacctatgccgcctttgcaacccgtcgcgcctatgattttattcaccaggtcatcgccgaagagcatctgaacgtgaagatctgcgcggcgctgccgggcctgacgaccggctatggccccagccatcaggccaccgaagatctggcgatcatgcgcggtatccccgggatggttatcgtcgatccttgcgatgcgctggagatagagcaggcggtaccggccattgccgatcaccaggggccggtgtatatgcgtctgctgcgcggtaaggtgccgctggtgctggataaatatgactatcagttcgaactgggtaaggcgaagctgctggaggacggcaacgatgtgctgattatctcctccgggctgatgaccatgcgcgcgctggaggcggctgaaaagctgcgggccgataatatcggcgtggcggttctgcacgtgccgaccatcaaaccgctggatgagaaagcgattattgaacaggcgtcgaagccgggccgcctggtggtaactgcggagaaccacaccgcggtcggcggcctgggggaagcggtggccgcgctgctgatgcgtaagggcgtacgctgtgagctggatagcgtggggctgcccgacgcgttcctgttagccggcgccctgccgaccctccacgatcgctacggcatctccaccgcgaagattgtcgaaaaaattaagtatcgtctgcgttaaccgcgctgctatggcccactggccgctgagcgcgctcagcggccttctcatgcccgccagccaggcgcggcattcttttgcagattttatgcggcctgtcacaaaatctgctagactgcgccccttcatggcattgtggtttttgccatctcttatcgcaataatctccctgaaaactacgcccttcaccgggccggggcggttcggagttgttatgtcttttgattccctaggcctgaatcccgatatcctgcgcgctgtcgctgagcagggctacgttgagccgacccctatccagcagcaggcgatcccggcggtactgcagggccgtgacctgatggccagcgcccagaccggcaccggtaaaacggcgggctttaccctgccgctgctgcagcgcctgatccagaatgagccgcacgcaaagggccgtcgtccggtgcgcgcgctgatcctgaccccgacccgtgagctggcggcgcaggtgggcgagaacgtccgcgattacagtaaatacctgaatattcgctcgctggtggtctttggcggcgtgagcatcaacccgcagatgatgaagctgcgcggcggcgtcgacatcctcgtcgccaccccgggccgtctgctggatcttgaacatcagaacgccgtcagtcttgataaagttgaaatcctcgtgctggacgaagcggaccgtatgctggatatgggctttatccatgacatccgtcgcgtactggccaaactgccggcgcgtcgacagaacctgctgttctcggcgaccttctccgacgagatcaagggcctggccgagaaactgctgcacaacccgctggaagtggaagtggcgcgtcgtaacaccgcgtccgagcagatcacccagcacgtccatttcgttgacaagaaccgcaagcgtgaactgctgtcgcagcttatcggcgaaggcaactggcagcaggtgctggtgtttacccgtaccaagcatggcgccaaccacctcgcggaacagctcaacaaagacggcatccgcagcgcggcgatccatggcaacaagagccagggagcgcgtacccgcgcgctggccgactttaaatccggcggcattcgcgtgctggtggcgaccgatatcgccgcccgcggtctggatatcgaagagctgccgcacgtggtgaactacgagctgccgaacgtaccggaagattacgtccaccgtatcggccgtaccggtcgcgcggcggccaccggcgaagccttatcgctggtgtgcgtggatgagcataagctgctgcgcgatatcgagcgcctgctgaaaaaagagatcccgcgcatcgcgattgccggctatgagccggatccgtccattaaagccgaacctatccagaacggtcgccagcagcgcggcggcggtcgtgggcaaggtcagggacgcggcggccagggtcagggacgcagcggacagccgcgcagccagaataatgccccgcgccgtcaggacggcgaggcgccgaaagcgcgcactcaggacggcaaaccgccgcgccgccgtcgcccgcgtaaaccggctggcgaataacacgctgatgtccgggccgcgataacgcgccccggctcaggcccgtctgtccgctacgcggcggcgggcctttttctttccattacactatttgtcgagcaggcttccacactccgcagaaagcaatacctccgggcgggcaaaaatggcacaatagtggctgtttatacagtattcaggttttctcatggctttgaccgctgcgctgaaagcgcaaatcgccgcctggtataaggcgcttcaggaacagatcccggactttattccgcgtcccccgcagcggcagatgatcgccgatgtggcgaaaacccttgccggggaagagggcaggcatctggctatcgaagcgccgaccggcgtcggcaaaacgctgtcatatctgatcccgggcatcgccatcgcccgcgaggaacaaaaaacgctggtggtcagcaccgccaacgtcgccctgcaggatcaaatctacagtaaggacctgccgctgctgcgtaaaatcattccctacctgcgcttcaccgccgcctttggccgcggacgctacgtctgtccgcgcaacctgacggcgctggccagcaccgagccgtcgcagcaggatctgctggcctttctcgatgacgatctcaccccgaataatcaggcggagcagaagctgtgcgcgaccctgaagcaggatctcgacagctaccgctgggacggcctgcgcgaccataccgacaaagccatcgacgatgggctatggagccggctgagcaccgataaggccagctgcctgaaccgcaactgccactactatcgcgagtgcccgttctttgtggcgcggcgggaaattcaggaggcggaagtggtggtggccaaccatgcgctggtgatggcggcgatggagagcgaagcggtgctgccggagccgaaaaacctgctgctggtcctcgatgaaggccatcatctgccggacgtcgcccgcgacgcgctggagatgagcgccgagatcaccgccccctggtttcgcctgcagctggatctgttctgcaagctggtggccacctgcatggagcagtttcgtccgaaaaccacgccgccgctggccaatccggagcggctcaccgctcattgcgaagagcttttcgagctgattgcctcgttgaataatattctcaatctctatatgcccgccggtcaggaagcggagcatcgcttcccgatgggcgaactgccgcaggaggtgatggagatctgccagcggctggcgaagctcaccgagttgctgcgcggcctggcggagctgttcctgaacgatctcagcgaaaagaccggcagccatgacgtggtgcgcctgcatcgggtgctgctgcagatgaaccgcgcccttggcatgtttgaaagccaaagcaagctgtggcgcctggcgtcgctggcgcagtcctcaggcgcgccggtaaccaaatgggcgacgcgggtggtgcgcgatggccagatccacgtctggttccactgcgtcgggatccgcgtcagcgatcagcttgaacggctgctgtggcgcagcgtgccgcatatcgtggtgacgtcagcgacgctgcgctcgctaaacagcttctcgcgcctgcaggagatgagcggtctgaaggagaaagcgggggaccgcttcgtggcgctggattcgccgttcaaccacgtggagcaggggaaaattattattcctcaaatgcgttatgaaccgctgatggataacgaagagcagcacattgccgagatggcggcctattttcgccagcaggtggagagcaaaaaacatctcgggatgctggtgctgtttgccagcgggcgggcgatgaaccgcttcctcgagcatgtgaccgatctgcgcctgatgctgttggtgcagggcgaccagccgcgctaccggctggtggagctgcatcgcaaacgggtggaaagcggcgagcgcagcgtgctggtgggtctgcagtcctttgccgaaggtctcgatttaaaaggcgatctgctgagccaggtgcatatccataaaatcgcttttccgcccatcgacagcccggtagtgatcaccgaaggcgaatggctgaaaagcctcaatcgttatcccttcgaggtacagagtttgcccagcgcctcctttaatcttattcagcaggtggggcgtttgatccgtagccataactgctggggagaggtggtgatttacgataagcgtctgttgaccaaaaactacggcgcgcgtctactgaacgcgttacctgtttttcccatagagcagccgggcgttccggaggttatagtaaaacggaaagcaaaacagacagcaaaacagacagcaaaacagacgggccgcaaacgtcgctgacgccggcgcgtgatgcaccagggggagccatggagtacagcaaaattataaaagaggtgggtcgcggtaagaatcatgcccgcgatctcgatgaagagaccgcccgtgcgctctacgcgcggatgctgaacagcgaggtgccggagctggagctggggggaatattaatcgccctgcgcattaaaggcgaaggcgaagcggagatgaaaggtttttacgccgcgatgcagcagcatacgctgcgcctgaccccgccggccggcaagccgatgccgatcgttatccccagctacaacggcgcgcgcaagcaggcgaacctcacgccgctgctggcgatgctcctgcacaagctgggatttccggtggtggttcacggcgtcagtcacgatcccacccgggtgctgaccgaaaccatttttaccctgctggacattccggccaccctgcacgccggacaggctcaggcgcagctggagggccatgaaccggtgtatatcccggtggggaccttctgtccgccgctggagaaacagctggcgatgcgctggcggatgggcgtacgcaacagcgcccataccctggccaagctggccacgccgtttggcgaaggggaggcattgcgtctctccagcgtgtcgcatccggaatatgttccccgggtggcgaacttctttcgcgagaccggtggccgcgcgctgctgatgcatggtaccgagggcgaagtgtacgccaacccgcagcgctgtccgcagatcagcctgattgatgagcagggcgtgcgggtgctgtacgaacgccagactgagatggcagcggaggcggtggtcctgccgacctcgaaagaccctgaggtcaccgcgcgctggattgaacgctgcgtcgctggcgtcgaaccggtgcccaactcgttgaagatccagcttgcctgctgcctgctggcctgcggggaagtcacctcgctggagcagggcctcagccgcgtcaacgactgttggtgatcggatctgcaggataaaaaaaagcccgtccggtggctcggacgggcaaggcaagggtattaaaggtcttttcagggttaattcagtggcttacagatgggtgcagcgattatttatagataaccgcagtaccgctcagtttgttgttggtgttagcggaagtaatgctgtagccggtcgcgccagcggcttcggctttagcagccagttttgcttccagaccatctaaagtggttgcgccttgcgcagacaccacgccgatcttattcatgctttcagcctgagcgggggtaaccggttcggcggcaaaggcgccgaaggaaagagcggtcagagcgatggcagcggcagcatatgtgatgtttttcatagttaatctctcgcaggttgttctgttcaggggacgatgttccgtcgatgtgataagtatcacgcttttttgcgggagataaaatcgaaggaaattcacagtcttcatcgaattttttgaatgattaataatttactgattattaataaattatttctcattcttttcgtcacgaagcgtagcgtggaagaccgacgcgtttaagggcacatattgcgactttttccgccaaaaaatgtgcgcgaaaagataatgcgaaaggctgtcataaacggtaaaggaaagtcagcgtagctggctatccttggaaccgcgacgattatatcctgaaaatgtattgttatgtaaatctttctcctgctggcacttcacgcagtatctgacccctgggatggcctgtcgacgggcctccggaatcggctctccgcattcatcacaaaatttgttgctttcgccgcgcggaagctcgcggcgggcgcgagccaccgcatcgtcaatagtgctgtcgatctgatcctgtacggcgccgtcgcctgcccaacctgatgccatcgtctgcctcctgtaaaaggttattgataaattatagctgaaccgtacagccggttaccgctgctggcggcattgatccgccaggctatcgccccctggcggtgggccttatccgcgagggcggccgccaggtcgtccagggtgctggcgccgaaggcggagacggtgccgacagggcggagcggcccgttatagggcagtacgggtggcggtggcaggggagaggccgcggtggcatgagcggtgagcgccgcggcgaacagcagcgagacgaatttcatcagcatatcctcataaaccgcatgggacatagcttaagtgtaggtctttccagaccgcgcgacagggaatgtttaatgcaaaacagtgcgttttgcatgctaccggcgcaggggagcgctactctggccggtagattatttagcgggcgtcagggcggatcatgtcaaagcgcaggctgtcatcaataccgtaataggcgctcgggccaccggcgcgcaggatcggctgggcccgggcggtttgatagataccgttgtccagcagtgattcatcgatatgcacggcgaccacttcaccgagcaccagccacgtatcgacagggttgccgtcggcggtggtgagttgaatacactgcgacagacggcactcaaagtttaccggactctccgcgacccggggagcgctgaccaggcggctggcggcggcggtgaggccggcgcgcacgaattcgtcctcatggtgcggaatcgaggctgacgtttcattcatcgccatggccagcggtcgcgtcgccaggttccagacgaactcctttgtttcgacgatatttcgcacgctgtctttccagccgctactggcgaaaccaatgattggcggccgatagttaaagcagttaaaaaagctgtatggcgccagattacgctggccctcggcgtcctgggaggcgatccagcctatcgggcgaggcccgattatcgcgttcagcgggtcatgcggcaggccgtggccctgcgaaggttgataaaagtacatgctgcacctgtcacggataatggagatatccagactcccttatttaccgcgccgccgtcaacgggtatcttacgcggctgttcaaaggagattgtcatgaaagcccagaaaccggggttacacccgcgtaaccgccaccatcaacgctacgacctgcccgcgctctgccaggcccatcctgacctgcagggctacattacgctcaatccgctgggtgagcagaccattgattttgccaatccgcaggcggtgaaggcgttgaataaagcgctgctggcgcatttctacgcggtcaaacactgggacattcctgacggctttctctgtccgccggtgcctgggcgggccgactatattcatcatctggcggatctgctggccggggatagcggcgaggtgccgaaggatgccacgatccttgatattggcaccggcgctaacctcatctatcccctgatcggcgctcacgagtatggctggcgctttaccggcagtgaaatcaacccgcaggcgttcgccagcgcgcaggcgattatcaatggcaacccgggcttgacccggcagatccgcctgcgccggcaaaaagagagccaggctatctttcacggcgtgatccataaaaacgagacctacgacgccacgctgtgtaatccgccgttccatgactccgcagagagcgcccgggcggggggcgagcgcaagcgccgcaacctcggactcggcgccgaaagtggcctcaattttggcggtcagcagcaggagctgtggtgcgaagggggcgaagtagcctttatctcgcagatgatccgcgaaagccaggccttcgcccgccaggtgaaatggtttacctcgctggtgtcgcgtggcgataatctgccgccgctctaccgcctgctgaccgaggtcggcgcagtgaaagtggtgaaaaaggagatggcccaggggcaaaagcaaagtcgctttatcgcctggagctttatggacgacgccaaacgccgtcgtccattctaacgctactcggcggccgggctgtcggcgcccggcatcggcagctgctgccaggtctgtaccggcgcgcgaaccccggcgcggtcgaagtgctttttcacctgggtgtcgagggcaaaacgcaccgtccactgcttcagcggcagggtggtgaagctgacgcgtagcgtaaaggcggtattgctcagccccaccagcccggcgaacgacggttcgccaatgatcagaccgcggatctcctcctgggccagcagatcgtccaccgctgccttcagcgcctggctggctttatccagatcctcatggcggtcaacgtcatagttagccacaaccgagccaatgccgcgcacgaagttggcaaaggtggtgatcgaggaccagggaataatgtgataggcgccggtatcctgacgtacccccactgagcgaatcgacattcgttccacggtgccggtcaaaggaccgatggtgaccaggtcgccggtgttcatcccgttctcaaactggataaatatgccagtgataatgtctttgaccagggtttgcgcaccaaacgaaatggccagccctaacgccccggcgcccgccagcagcggcgcaatgtttaccccaatttccgagagcaggatcatcaccgtgatggtgctgatcaccaccgccagcgcgttgcgaaacagcgtcagcagcgtccgggcccgcgcgctgggcagcggacggccatgaatatccgatgccagccggttttcaatcaggctggccagaaccgtccagccaatggcggagaagaagaggatcagggcgatgcggatcagcacatccaccgttttttgcccggcatcgttatgcagccattcccggaagtcaaacaggccccaggcgctcaacagcagcataatggcgacacagacggtgagaatgcgcgccgccttcagcgaggcggagatccagccatttagacgcttttgcagttcagggtagttgcgctgagtggcgggcgacagggtgatggttttggctatccagcgcgacaggatgccagacaccagcgccgcgccgccgataatcgccaggctttgcagggtggcgcccatcatgaatttcaggctgttgcccgggtcgaacagcgaaaagaaaaaaagcaccacaaagtaggcgcaggccagccagtgccagaccagcgcgaaggcgcggataaacaggctaaagaaagcgagtgagtggtcggccaggtggatcaacccttgagtaatcaccgctttgttatgaaaaatcaggtacagcgcccacagcgtaatgcacaacatgatgacgacgttagccagcgcgccaacctgaacattcacctgattggaaataatcggcaccgcgacgatcagaccgtaaccaatcaggctgctgagcgcgctcaggcgcaggctccagtatgacgcggcctcgtcgctgaggttaaagggccgcagggcaggaatgcgcgggcagaaaatgagccgcagaatagctttaaaaaactcgatcagcgcgaaggcgttgaggaaaaggctctgctggaaggcgatggtagggttattcccattcaggcgatcgcttagcagctgaccgacaaacagggttagcgccagcagcagcaggtcgatgataaacgccccggcgatggtcaggggcagctggagccagttaccgcgatcgcggtttttatgccgtccccattcgcccattttgcgatacagcggcagcgccgcgaggcgtaccagccaccagaaggcaaacaccagcccggccagcagtaaaaaatgccaggccgcgctggtaaaggtttgcggattaaagggcttatgcggtgagccggtgatattgcgccacagctgggaaaagcgtgatgagagctgttcgccatattcccggcttatctgggtgacgttctccagtaccgtggtctcttctttcaccgccggtggcgtcagcgtcggggtgctgtcgggcggcggcgtggcggctgctttacgcagctggtcaatgagctcctgacgggcggagtcgttggccagcacatcggccagtgcggcataagccgctcttttctgttccacatcgggttcgctggcgctgtttttatcagtgttaggcgtcggcacgccggggagggtggcggcggaaagcggggcagtaaacagtgcagcgagcaaaagcaggatccacggcatgggcacctccgttgcaacgtaaacgggtaagtatagaagccgctggcggaaggggagggaagaggattctggaaaagcggctctcatcgtgggggagagagccgttgtgggtcaggcgacgtgttgcaggaattcacgcaggcgcgggctgggcgggttcttcaccagctcctggggattgccgtcttcagcaattcgtcctttgtcgataaagattagtcgcgaggccactttttcggcaaagccgatttcgtgggtcacaatcaccatcgtcatgccctcttccgccaggtcctgcatcaccttgagcacttcatggcgcagctccgggtcgagcgcggaggtcggttcatcaaacagcatcatcttcggcttcaccgccagcgcgcgggcgatggccacacgctgttgctggccgccggagagttcggacggatagtgatgcgcgcgctcagccagaccgactttcgccagcagctctttcgcctgcttctctgccgcctgcttgctggcgccgcgtacccgcagcgggccaaacatcacgttttccagcgccgtgaggtgcgggaacagataaaactgctggaaaaccatcccggcttcctgacgaatcagacgttcgtccaccttcgggtcgttgaccttcagaccatcgacaatcagatcgccgctggtgatctcttccagcttattgatgcagcgcagcatcgttgatttaccggaaccggaagggccgataatgaccaccacttcaccctgattaattttcagagagatatcgtgtagcacctgggtcggaccaaagtgcttggagacgtttttaaactcaatcacaggattttcatccttctttcaagacgacgcagaataaagctcaggaccagggtgataatcaggtagatcacggctacggcgctccagatttccagcgcgcggaagttgcccgcgatgatctcctgtccctgacgggtcagttcggcgacgccgatgacgatgaacagcgaggtatccttgatgctgatgatccactggttgcccagcggcggcagcatgcggcgcagcgccagcggcaggatcacgtggcgaatggtttcgcgacgcgacaggccaagcgccaggcccgcttcgcggaagcctttatgtatggagagcaccgcgccgcgagtgatttccgcgatataggcgcccgagtttatcatgatggtcactaccgccgcggagaaggggtcgatgcgcagatcgctaaaggccatcggcagcgcaaagtagatgaacataacctgcaccacaatcggggtgccgcgaatgatttcaataaagaccagcgcgatgtggttggcgatccagccgccgaagcagcgggcgaaaccggccaccagaccaattatcagaccgccggccaggccgaggacggaaatccacagcgtcattttggcgccttccagcaaaatcggaatggcaggccagatggcactccagtcaaactgcataatacgttcctgttaccgtgtcgagagcagaggaaagcctccgccaaaataccgtctcccgccgagcctgtgccggaagaccgttgtggtgtcgccggacctcggtccggcgaagtacgtttttattatttgggttcagtgccgaaccattttttataaatttcgttataggtaccattgtcgcgcagcgttttcagcgcaccgttcactttctcacgcagctcgtcgctgcctttcgggaaggcgataccgtagttttgcgcttccagtgattcgcctaccgctttgaacttaccgttgcccgcggttttgatgaagtacagaatattcggcgtatcgtgcagcacggcatccgcgcgaccggttcccagctccatataggcgttatcgatgttcgggaactgacgcagatctttggttttgatattggctttcgcgtagtcaacggagccggtgccgctcttcaccgcgaccactttaccgttcagatctttgacatctttgatgtcgttattattagcgttgaccatcaccagcaggccgcttttatagtagccgtcggagaagtcgatcgcttttttacgctcgtcggtaatggtgatccccgccagcgccagatcgatatttttggtttgcagcgccgggataatgccgctgaagtccattggcttcagggtgtagtcgagcttcagctctttggcgatagccgcccacaggtcaacgtcaaaacccacatacttatcgccttgcttaaattcgaacgggacgaacgccgtatcggtggcgacaaccagggtcttattagcggcatgggaagaaaccgcaaaagccagggtcagtgcagccagtgaaactttaaatacagacttcatagcatttccttttatatccacgggacgatcccctgcgagaacgactagcctaatgaaaaaatcgtgccacttttacaagctgttgtttttcaacaaacgaagcgtaagtcgttgcacaagaacgatcatttcaggcagtgactgcaccatgatggggcgtcattttggtgcgtcataagggtgctgaattaccagcccatttttagcgcaaaccctgatgggaaaacaatctcgacgtaacgattgtgtgaggtgattattacaatctttttacttttgcgcgcattttcatcaatctggtgccctgaaacggtgcaaggccagtgggggatgaaaagcaaaggatggaatatagggcagggagaaacgctgaggcgccgccgaccgcgctgggccggcggcaaagccttactcgatgttggcttcaatgaaccacaggaatttatccagatcgcgggaagccgcggtgaagatatctgcagtgtcttcgtcttttgcttcgtcgatcgccttacgcacatcgttcgccactaccgcgtagcggtcagccagggctttcaggtgatcctgaacgtgatggatgtccagtgggtagctctgcagcggggttttgctgttaatgacctgagtggtacccagggcgacgccgcccagctgcaccgcgcgctcggccatggtgtccagatgttcggtcagcgcggtacggaagccatccagcatttcgtgcacggcgataaagttcgcaccgcgcatattccagtgtgcctgcttggtgataagtgacaggtcaatgaactggatcacctggcgattcaacagctcaatggtcgctttcttttcgctgtcagcgacatcgttgcgggtatagaccagattagacgcttttgatttaaccagttttgcggtactcatcgtttcatatcctcttgatattgatgctcatcacacttcagatctgaatgatgtggagcgttgtcccaaatgacttcggaaataagtatagcaagggttttcaagagtgaggcatcggcaggctatatcactccgatagcgcaaagtggttggttattttaaaaatatttaaatatcaggtatttatatttggctgaacggcccggatttctctcgggccggcgccgtaacagaatgttaattgatatcgacctgctcgactttactctgccgttgcatagtcagcgtggcgcccatcgaggcgataatgatcgcgccgagcgccagggtctgggagagcttcagcgtttcaccgaggaagatcataccggagagggcagctaacgctggctcaaggctcatcagcgtgccgaaggtgcgcgtcggcaagcgcgtcagggccatcatctcgagggagtagggcagcgcggtggagagaatcgcgatccccaaacccagcggcagcagcgaccactgccacagcgtatcggtggcctgcgccatgcctaacggcacaaacaccagcgaggcgatgagcgaccccatcgctaccgtggctggaccatgctcttcaccggcacgctgtccggtcagaatatagaccgcccagcacgccccggcgccgagggcgaacagcgcgccggttaaatcgacctgcgccacgttctgccccagcggcagaagataccatagtccgaggatcgccagcgccacccagacaaaatccagcgggcggcgcgaaccaaacagcgccaccgccagcgggccggtaaactccagggccaccgccacgccgagcggaatgcgctgcagggataaataaaagagatagttcatcgccccgagcgccaggccgtacagtagcagcggcacgcgctgcgccggggagaaacgtagccgccatggcttgaacaccaccaccagaatcagcgttcccaacgccagacgcagggcggtgacgcccggggcgccgaccaccgggaacagcgatttagcaagcgatgcgccgctttgaatcgaggtcatggcgactaaaatcaccagtatcggcaaccatgccgccgcttttctggatggaccgggcatcctttctcctgtcaggttttgtcaaaaggggtaaaagttccagtgtactggaattacctgccggcggttgagctaatgttgaaaaaaacaggggcaaaaacagtacaatggcgaaaactgctgagaaattcaccaggcggttaggattaatctggatgcttgcgaatttcttaatgagcgttaagatgtaagttaacgccaaaaattgttgttttccatattgttacagaaatatggaaacttttggttacatgaaaaagtatgttagacaatgtaaactccaaagagtttcccaaaagtttttgatatatttaaggcttaggacttattagaaacacatttgaggtggttatgaataaaattgcacgtctttcagcactggccgttgttctggctgcatccgtaggtaccactgcatttgctgcaacttctaccgtaaccggcggttacgcgcagagcgacatgcagggtaaagcgaacaaagctggcggtttcaacctgaaataccgttacgagcaagataacaacccgctgggcgttatcggttccttcacctacaccgagaaggataacaacagcaacggtacttacaacaaaggtcagtactacggcatcaccgctggtccggcttaccgtctgaacgactgggcaagcatctacggcgtagtgggtgttggttacggtaaattccagaacaacaactaccctcataaatccgatatgagcgactacggtttctcctacggtgctggtctgcagttcaacccgatcgaaaacgttgctctggacttctcctacgagcagtctcgtattcgtaacgttgacgtcggcacctggattgctggcgtgggttaccgcttctaatcactccggtgatatgaaaaatccgcctctcggggcggattttttttgcctgctgacggccggcccgggcgactggccgggccggcgcgattaattgactgtgaactcatcggtaccgaggtgagcgtagtccaccttctgcagctggaagttggtgatgtacaccggaccggccttttgctcagagataaaccgatagcgtggggtgatttccgccgcctggatcccggtccactgggagaagaaactgaggaaatcattcgccgaacgctgcgccttaatcactttatgcgctttgtcatcgctggatagcaccataaacggcacctggaagttctgctggaacttatcgtcatgcgccagatactgcacctctttgccccgctccttgaacgccagaccatgatcggaaaaataggtcagggaaaaagtgtcaccggaattttgcaactgatgataaagcttagccagcagcgaatcggtctgcgtcatgctgtagaggtagcatgaggtctctttcgactgaacgaaaaccgtgtatttgcccttggtccgatcgcaggcctgtgggtgagagcccatcaggtgcaggacaatcagctgcggctgggtacgctgggttgagagcacctgctcggtcagcttcagcaactgctcgtcctgggtgtttttattggcttcgaaatcgccgtttttcaggaactgtacttcatccgcccgtttggcgatgctggcgatagcggtgtcgtactcgccaatttgcccctggttggagaaccaccaggtctggaaaccggcgcggttggcgagggtgacaaagttatcctgatactgtggtttgccatcgaccacccggttaagcgtcaggccgagcgatttctgcgttgagccgctggcggcgatgtagttgttaaacagataaccgtttaccgagctggcaaacggcgtgttgtcccaatggccaccgaaagcgccgagggcatcgcggcgcgcgctttcaccgatcaccaccacatagagatggtattttggctttaccgccaacacgtgccagctgtctttcatgccagccagctgcgccatccgggcctgttcgtccagcacctcgttgttattcaccaccacgtctttgacaaaacgaaaggccggataaccggtgtcaatcaccttgaatacaccgccccaggcaaggttttgcaccggctggagaaagaagatcccgatgctgaacaacaggcccagcgtatccatttttccccagcgtgatggctcaacgatcctacggcgaaccgcaatgaccccgagagcgaagatgaagaccgccagcagatagttgtaccacgggaagatggtcaggatttccgtagactcttccacgttggtggcgtgcagcgccagcagagtgttgaagttgggggcaccgtaggcctggccaaagggatagtacagagccgccagcagggaataggcgccgaccaccgctttctggacgcgcggaaaggcgcgccacagcagatgtaacacacaggtaaatgccacggtataaagcaggctaaattcatagcccagcgccaggttaattaacagcgactgtaaaaagtagaatcccgtccatgggttcagtgccagtcggcgggcgaccagcgtatctttcagggtggtgacattcatagtaaacaatcaaaaagaggccatgcgcatcccctggcgtcaaggggtaaaacctgctggacagtgcgtgaagagggtctctgcgagccgcgaatgtggcagggctgtgcaaagatagggcttgtaaatggtaaggtcaaccaggcataacagattgttttgcgagagcgcttacaaaacttgaaaaaaggtcagggaaacgggggaaccggtcattttaccggcggaaaatgacagaaaaatgaagcggcgtaccgcgacgccgccttaggaattgggtttgccctgctgcggtttaccgttgatcatctcgcacagcataccgatcagcattaatcgtactttaaagggtgaatggctaaacacgtttatgcacctcttgaattcattcatctgctctcctcctgccagttcgctccgtcattccctgatggatgtttgcattatatacagatatagcacaggctatattttatagctatggctaaaacgttaattttttgtgctcttggcgcaatccattacaatgtggatctttttatacgatgcttgacgcgtcacacgaatgaggaagcacaatgaaccgtcgcgcaggtaagccaataacaaaaaaagtgacgcagttagtgaatgttgaagagcacgtggaagggtttcgccaggtgcgggaagcgcatcgccgcgagctgatcgatgactatgtggagctgatctccgatctgatcaacgaagtgggcgaggcgcgccaggtggatatggccgcgcgtcttggcgtttcgcaacctacggtcgctaaaatgctcaaacgcctggccagcgtcggtcttattgaacagatcccctggcgcgggatcttcttaacctcggaaggtgagaagctagcccaggagagccgcgagcgccatcaaatcgtggagaacttcctgctggcgatcggcgtcagcccggagattgcccgacgtgatgcggaagggatggagcatcacgtgagcgaagagacgctggcgatgttcctgaaatttacccaaacacagggatctcaggaagcatgactcttcccttcgtccagtcgctgctgcgcgatcgttttctccatttgctgctgattatcgcctgcgtgctcagcgccatcgtgccgtttgtcccggcaagctggccggcggccattgactggcataccatcgtcacgcttagcggcctgatgttgttgactaaggggatcgaactgagcggctattttgacgtgctgggccgaaaaatggcccgccgctttgtgactgagcgccagctggccatctttatggtgctggcggcggcgctgttgtctacctttcttaccaacgacgttgcgctgtttattgtggtgccgttgacgctgacgctaaaaaaatggtgcgccatcccggtgaaccggctgattattttcgaagcgttggcggtgaacgccggttcgctgctgacgccgatcggcaacccgcagaatattttgctgtggggacgatccggcctctctttcttcgggtttatcggtcagatgctgcctctggcagcggcgatgatgctgaccctgctggcgctgtgctggttctgttttccggcgaagcggctcagttaccagagcagcgacagggcgccgtcatggcaacccaagctcgtctggagctgtctgggactgtatgtggtgtttctgacggcgctggagatgaatcaggccctgtgggggctggcgctcgtgctgctgggcttcctggtgctggcccgggcggtgatcgtccatgtcgactggtcgctgttgctggtgtttatggtgatgtttattgacgtccatctgctgacccagcttccggcgctgcaccaggtgctgagcggggtggggaccctctccggcggtggactgtggcttactgctattggcctgtcgcaggtgatcagtaatgtgccctcgactattctgttgctcaactatgtcccgccgtcgatactgctcgcatgggcggttaacgtgggcggctttggcctgctgccgggctcgctggccaatattatcgccctgcgtatggccagcgatcggcgcatctggtggcgcttccatctctactccattccaatgctgctatgggcggcactcagcggctactggctcttcaaactcagcgcctgatctcaacataatcgcgccatcattcacatcgatcgccaggatcgcctttcggggcgatctttttttgtccggctcacagaaaccgatcccggcctttgcttaccttttcactttccggtatatgactagtcattatgtttaaatggctagtcatataccgaggcgcagcatgaagaacagactaccggcagattttttatggggaaattccgtctccagcatgcagacggagggggcgtggaacgagggtggcaaggggatgtcggtgtatgatatccgtcaaccggcggagttcgcctccgactggaaggtggcgaccgactcttatcatcgttatcgggaagatttcgatttgatgcaggatctgggcatgaactgctaccgttttcagatcgcctggagccgggtgtgccctgacggagatggcgaattcaatgaacaggggatcgccttctaccatcaatttatagatgaactgctcgcccgcggcattgagccgatgatctgcctgtaccacttcgatatgccgctgtcgttggcggagcgctacaacggttttaccgaccgccgggtgatggacgcttttatccgctacggccagaagatgatcgcctgctatggcgacaaggtgaaatactggctcacctttaatgagcagaatctgtaccattcgccggaagcgtttctgatttccggctatctgcagggggagaagaccctgcgcgaactgtatctgatccagcatcatgtcatgatggcgcacgtccatctgactcactatctgcaccagacgaagccgcagtgtcagatgggcggaatgctggctcacgctctggtctatacggctacctgcaaaccacgcgatatcctctgcgcccagcagctggatgagttcttaaaccagaacctgctgcgcgcctacgcgggtgagggttatagcccggaggtgatgcattttgtcgccgcggaaggattcgatgatatctatcgtccggaggatcttgccctgatggcgacggtgagggtcgattatctggcgttcagctattacgccagccgcacattgaacagcgacgcgatcccgccgggaacggcggtcaacaactatatgctgtttggcaaccaggataacccgttcctgaaagcgacggaatggaactggcagattgatccgctgggcttccggacgatcatcactcgttactataacgactggcgcctgccggtgttcccgattgaaaacggcatcggggtgattgagtcctgggacggcgaacatcccattgccgacgattaccgcatcgcttaccatcgcgaccatatcaacgccatgaaagcggccatctttgaggatggggcgcaggtgatcggctatctcggctggggattaatcgatatcctgagctcacagggcgatatgcgtaagcgctacggcgtggtgtacgtcaatcgcgaaaaccatgacctcaaggacctgcggcgggtgccgaagaagagctatgcatggctgaagcaggtgttccgcagcaacggcgaagcgatgtaacgctgccctggcggtcagatggtgtatccagcccgccagccactcactgaatggataaggaccgggaaatgacggcgaagtatctgcaaatcgcgcgggaaataaaaaaacgcatcatcagccagcagtatccggctagcgcgccgctacccgaccagtttgcgctggcggcggagttcagcaccagccggatgaccatccagcaggcgatgcgccagttaatcgtcgaagggctgatctatacccgaaaagggcagggcacctttgtgcggaaaaatttccttcagctgtcgcagtgggagctgcccggcagcgactatttcggcgccaccaaaacctgggagcatcttggcgaggtgcaaagcgaagtggtgcgttttgcggtgcgctttcccagcgacaaggagcaaagttcgctgcttatcgacgccgatgccccggtgtatgactttgttcgcctgcggctgctcaacggcgagccggtatcgctggatctgacggtcatgccggtggggctggtgccggggttaaccaaaagccatctggaaggttccgtgtttcgctatgtgcaggagacgctggggctgaagctgatgggatcttaccgcgtggtgcgggcgatgaagcccggggaactggataaacagcatcttcactgcgaaccgaccgatccggtgctggaggtggagcaggttatctatctggaggatggcacgccgctggagtacgcccactgccattatcgctacgatcacggcgggattattctggtgaataacggctaggccggggctcctgctggcggctgcgcatagcggggttacggcgtggtagggtttggtagcccgggcgagcgttagccgcctcgagggaaaatgccgataaaaaaacggcgggcatcaggcccgccgtttttcttgtcagcacaacttagttcagacgcaccggcataccggagcggttctggatagcctgctcaaccacgttctgatcgacatcagactggctggtaactgcctgtaccggctgagtcagggtgatcggcacgatctcgccgccctggaactgcgcttcggtggtcgacagcgggttgtgcacctcgatgtaacggctgccgtccggctcggtggtcgcttttaccggctcatcgataaactgtacgcgggtgccgaccggcacgttctcaaacaggaatttgatgtcatcgttacgcagacgcacgcagccgtggctcacgcgcaggccgataccgaagttagcgttggtgccgtggatggcgtacagacggccgatatacagcgcgtacagccccatcgggttatccggaccggccggtacgacggctggcagcgggttgccggcggcggcgtattcagcatgcattttggcggtcggtgtccaggtcgggccggccttcttgcgttcgactttggtggtccagttgatcggcgtatctttacctaactggccgatgccgatcggcagaacgatcacggtattggtgcctttcgggtagtagtacagacgcatttccgcgctgttgataatgatcccttcatgcacggtatccggcagaatcagctgctgagggatgttcaggacgctaccgcccttcggcaggtaagtatccacccccgggttggcttccagcatgttggaaagccccatctgatatttcgccgcgaagtattccagcggctgtttgttatcatccggaatggtaatgacctgattctgaccaaccaaacggctgccatcggttggcaaaggataggtgacagcagacgctgtattgcaaaagcctacgatggcgaaggctgccgctaagagtgtagataatttcatagtctttaatgtcgtgtgcgaaatcaacgccacacaggcctttgttaatgattgagacagtagatgggagcgcattatatgtgcattccgctgaacaggtaaatcagatgtgtacgaaatcacatttttttccctgtcgcctcggctgccgcggtccggcaggcggccgaagcatcgctcgccgcgcgggtaacgggcggttactcttccagcagccgggcctgcagcgcggcgcgaaccggcgcggtaagctggtactctgccgccagccaggcgtcgacggtgccatagcgctggtgaatagccgacagcgcggcggcgagataggactcttttaccgtcagaatatccgccaggctttggcgcccttgggcagtgaggtcgttgccgagcagctccaacatccaggcctccacctgcgtcagcatgccgtgggtaaggagatactcctccatcaccgtttcgctgtcgcagccgacggcgaacagcgttaacgcgcagccgacgccggtgcgatctttgccgaccgcgcagtgttgcagtaaagcgccttcaaaaggcgtggtcagccaggcggcgagctggcgataggccgggttgttaaacggcagctggcggtagagttgcagcataaactgctcgccgttcagcgcgttaagggtggcggcattcagctcggtgaccttcgcatttacctcgctcaccggcggattggccggcgcgttaagataatgggtaagcgggctaagcttgtccggagtacgggctacctctccggggtcgcgatagtcgagcacccggctgagcggcaaagtatcgaggtggttgagatcctccgccgttaaccggtttagcgcgccggatcgcaatagcttgccgctgcggacgcggcgtccatcggcggcaagctggccgcccaggtcgcgaaaattgatgccgccctgcagggataaaaaagccgggtgtcgcgataggctgctggtcatgggactccttataaatacgtacagaataaccgtttgagcgcgggtttccggctcgtctgacaaagaccttagcacaagcgccgcggtggaatttaccgcaggccgtgaaaagtgtgtcatttgctggcataatgtctgctgtatcacacccctcatactcttttttcaggatatccccgtgctagtatccagcaacgttaccatgcagtttggcagcaagccgctgttcgaaaatatctccgttaaatttggcggcggcaaccgttatggtctgatcggcgccaacggcagcggtaaatcgacctttatgaagatcctcggcggcgatctcgaaccgacgctgggcaacgtttctctcgacccgaacgagcgcatcggtaagctgcgtcaggatcagttcgcctttgaagcgttcaccgtgctggatacggtcatcatgggccacggcgagctgtgggaagtgaagcaggagcgcgatcgtatctacgccctcgctgagatgagcgaagaagatggctacaaagtggccgacctggaagtcaaatatggcgaaatggacggctactcggcggaagcgcgcgccggcgaactgctgctcggcgtcggcattccggttgaacagcattatggcccgatgagcgaagtcgcgccgggctggaagctgcgcgtcctgctggcgcaggcgctgttttccaatccggatatcctgctgctcgatgaaccgaccaacaacctggacatcgacaccattcgctggctggagcagacgctgaacgatcgcgacagcaccatgattatcatttcgcacgaccgtcacttcctgaacatggtctgcacccacatggcggatctggactacggcgagctgcgcgtgtatccgggcaactacgacgaatacatgaccgcggccacccaggcgcgtgagcgtctgctggcggacaacgccaagaaaaaagcgcagattgcggacctgcagtccttcgttagccgcttcagcgccaacgcctctaaatcgcgtcaggccacctcgcgcgcgcgccagattgacaaaatcaagctggaagaggttaaagcctccagccgtcagaacccatttatccgcttcgagcaggataagaaactgttccgtaacgcgctggaagtggaagcccttaccaaaggctttgatgaaggtccgctgttcaaaaacgtcaacctgctgctggaagtgggcgaaaagatcgccattctgggcgccaacggcgtgggtaaatccaccatgctgaaaaccctggtaggcgaactgcagccggacaacggcagcgtgaaatggtctgaaaacgcgcaaatcggctactacgcgcaggaccatgagtacgagttcgaaaacgacctgacggtcttcgaatggatgagccagtggaagcaggaaggcgacgacgagcaggcagtacgcagcatcctcggccgtctgctgtttagccaggacgatatcaaaaagccggcgaaggtgctttccggtggcgagaaagggcgcatgctgttcggtaagctgatgatgcagaagccaaacatcctggtgatggacgaaccgaccaaccacctggatatggagtcgattgaatcgctgaacatggcgctggagatgtatcagggcaccctgatctttgtctcccacgaccgtgagtttgtcagctcgctggcgacccgcgtcctggagatcactccggaccgcgtgatcgacttcagcggcaactacgaagactacctgcgcagcaaaggtatcgagtaatccctgtccgttacccgggtagcggctacgccttacccgggcgacacgcggtgccgtttttttgtctggtggcggctaacgccttacccgacctacggttcttgcgacctgcctttaatgtcttcaccgcgctggctgaaactgccggtgttggtggcctcaaaatcgctgagacgttcccggaaggccggggcagcccgcatggatgcggcctgagggccgtgttttgcacggacgctgcctcggcccgacccgaagcctgcagggataagtcgaaggtaccacgaagtggcgattttggcggccagagcccggggtacaggggcggcggcgactggccgccccctgtacgctccctgcgccatgagagacataacgcagaagaaatatcgggagcgcaatctgctctgaaataataaaaaagaactgtttttcccggaccaaaaccgttgcaaaccgagaacagtaaccaaggtccgtacggcctgcttttaatttatttaccatgctggctgaaactaccggcctatggtcagaacctccactccgttccttcaacgccattcaccagcagcttacgcttttctcctaccggtaatgacagcttcagcgctttccacgccgggcgatagttgccgcgggcgttgatatccaggtttatgctgctggcgctgcaggtcatttcccactccagccagagcgcatccccctgtttatagccccagctttcgccgtcgtcttcaaacagcagaccgcgggttgagccggtacctttcagcgggaacagctgcagttcgcgacgatcgtctttttgcgcatcgacatggctgatacgttcactaagcggcagaccggcgccggcgcggaccaacagcggcagtttttccagcggcgcgtccagcgtcacccactggccgccggcgaaccactgatggctgtagaaatcgtaccaaccggcctgattatccggcagccatacttcacgctggcgggcgcccggctcgaccacgctggccaccagcaggtcgcggcccagcaggaagtcatcgcattcggcgaaggtctgcgcatcgtgctggtgatcgaggaaggtcgggcgcagcatcggctcatcatcagcatgcgcctgccatagcagagtgtacagatagggcaacaggcggtagcgcagctcaatggctgagcggatcgccggggtgatttccgggtacatccatgcttcgtttaccgtctggtcgtcattccacgagtgaatggtaaagcgcggatgcatgacgccattttgtacccagcgcacaaacagttccggctcgggtttatcgccggagaaaccgccgacgtcgtggccgacgttaaacagcccggaaaggctcatccccaggcccatgcggatgttatagcgcagcgtatcccagttggtgcggttgtcgccgctccaggtctgtacgtagcgctgcatcccggcgcagccggagcgggagatcagatatgggcgcttttgcggcgcaaagcgctgctgggcttccagcgaggcgcgcatcatcaacagcggcatcaccgggcgaatatgtttgatggcgatttcacggccaaagccgtagcagcgggcttcgccgtcccatacttcgtattcgttattatcgttccaggtcgaatcgatgcccatctccagtagctgggtggtcacgccttcctgccaccaggccacggtttgcggattggtgaaatcgagatgcgacccttcatcatcccagaagctggaacgctccggagcgtcagtttgcgaatcgcgaatgaagagaccgcgctccgccacctcgccgtagcgcgggtgatcctgcagcaggcacggtttgatattggcggccagcttcagcccggcatcgtgaaacgactggctcatcactttgggctgcggcaccttgtcgtagttccagttaaagacgtagcgcttgccgttgattgaggtatagccggaagagagctggaacgaatcgcaggggatcgcgtgctgctcgcacaggcggataaagttcatcagctgattttgcgcatccggcgcgtcggtatagtgcatggtggagccgctgtagccgaggctccatttgggtccaaacagcgttttaccggtcaggcgaacgaaggctttggtcacatccagcacctgcttaccggtaaacaggtaataatcgatgtcgccggcttccgcctgccagcggcgataggcggtgtggtagttgtcgatctcgttccccagatccagccagcagctgctcaggttgtcatagaacaggccgtagctgatatcgctgcgctgggtgatggtgaacggaatatgtttatacagcgggtcagtgctgacggcgttgtagcccatggcatcgaggttacgcatctcgtagcgtttaccggtgcgctgcaggtcgccggccttttcgcccaggccgtagaaacgctcgtctttgcggcggctcagataatgggcgacgccgtcgccgtgggcattcgccaggtaggcgctggtcggacggtcattggcaagcggctgccattcgccggcctcgtcgcgatagctccactccagccacagcggctggtgaacggtgacgcgcagctggcgggtggcgatagtcagcgtatcgccctcctgggccagctgccaggccgggagactaaaaccgctgaggtcatcccgggcgcggccttcccacggcacatcctgctgcggagcgatgctccaggtgcgatccagcgccagctggccctggcgttttagcaggacgcggaacaaattctcttccagtacgtacaggcacagggtgtgctggccatcgaccgtcagttcaacgtgatgctccagctgttgatgcaaactccagtgtttcagcgtcttcatatcttacatccactctcaggcgcgcttggcgcgacgttcagcaataaatgccaccaggaaaacggcgccaatcaggtcaaagaaacccatggcgatgaatagcgggttgaagccgattttgtcggcggtcaccccgattaataacgagaacaagaagctggcgatccacgctgcggagccgcgcataccgttgaccgtcgccatttgtcccttgtcgaaagactccaccaccagcgcgctgagcatgcaggagatgatctgatggccgaagccgccaatggagatcaggatgatggtgatatagggatcgcgggtgatggcgacgagggccagggagagcatcaggaacgcgccggttaccgagctggcgatcaccgagttcactcgcgtacagccgaaccagcgaacatacaggcgggtgaggtagccgctgaccacgctgccgagatcggcggcgagaaacggcagccaggcgaacatggcgatctgcttcaaatccatgccgtgctctttcgccaggtacagcggcacccagaaactcagcaccgcccaggcgggctcggccataaaggcgggaatggcgatcccgtagaaacgtttatttttcgagacggttttgagcgcggtaaagaagggctgttttaccggcggggcttcgttatcctgtttgatgtactccagctcgcttttgctgagattggggtgcttttccggggtctgatagaaggcccaccatagtactacccacagtagcgccagcgcgccggtaaacataaacgccccttgccagccgaaggaggcgtgggcgaagtagatgatcggcggggccagcatcgcgccgatggagaacccaacgccagcccagccggcggcgattggccgttcagatttcggaaaccattcgccgatggttttggcgttggccggagtagcggccgcctcggccccacccataaagaagcgcaacatagccaggtgcagccagctaccggccccggcgtgggcgatacaggccagcgcccaaagggtggcgcagatcataaagccaagcttcaggccgatgacgtcgataagccagccgcacagcggctggaaaatcgtgtaagccagctgaaacgcgccgacgatccacgagtattgttcggtagtaatgccgagggtcgctttcagttccggcgcgataattcccagcgagttgcgtgtgatgtagttgacggtaacgccaagtaaaaacaggaccagcacccaccagcgcaggtttttcactacccggcgcgttttgctgacagcgatatcattgttgaggccttgactcatagcacactccacaagacgtttgtagggggaaagtgacggtctctttccctgagtggtcacgtagatttattaactatttgaatagtctatttttaatctcaacatcattggtataactagtatgggagatgttggaccaattcaggctagggcagaaaaatcgtctggcaaagcgctatttatgcaagttttttcatgaaatgagcgagatcgcatatttgacagcggaatttgcttgtaacgtgtgctttggcgattatgaaaattctttcatttttcaatcggagctggatcacaaaatggataaaaagctgcgcgtcgccgaaattgccgcccgcaccgggctatcgcccagcaccgtttcacgcgtcctggccgggaaagcgaataccagcgacaaggcgcgccgggcggtgctggactgcgcccgcgagctgggtgtcatgcaggggttggccgccgggcgtctgctgctcaatcatctgctggtgtttgccccgcagcgcgcattcgatgagcgatcggatatcttctactaccgggtgatccagagcatcaataacgcgctggcggcgcatgaagtgcgcctgcgctactgcgcgctggatgagaacgacagcgacgccaacctgtttcttgcccgcatgaatgaacctgagacccaggccgcggtgctgctggggatcgacgatccgcatattcatggcctggcggcggatctgggcaaaccctgcgtattgatcaactgtcgggatgaagggatgcggctgccgtccatcgctcccgatcatcggctgatcggccagtgcgcagcccgctatctgtttgatatggggcatcgggcggtgatgaacgtgatgtgcctgcgccgctataccatggagctgcggctgggggggattcaggaggcgtggcgcgcgcgtaatctgcgctttaccgccagccgggatcttatcagcgtcgccaactttagcgccagagagacggaagagcaggtgggcgcctggcttgacggcttacagggcaggccgttgcccaccgccttcctggtgggcggcgattttatggccgccggcaccgtcagcgcattgcaaaagcgtggcctgcgggtgccgcaggatgtctcggtgatgagcattgacggatttaatctggcggcgattcaggaggtgccgctgaccgcggtgcatgtgccgcgggatgaactgggcagcgaggcggtgcatctcctgcagcagcgcctgctgcgcccggaggcgccgcacggctcgctactgctgcatggcacgctggtggtacgcgattcggtacggcggatccggccgggcaaaggccataccgccgtcgagccgcaggggctgtatgacgattagaccggcatacccagcgcccgtttgccgtggatattcagatcctccagggtgaagcgcccctgccagctggcttcatagtcctcgcgcgggaaatcccccggcgaggcgcctttttccagggcgatttttactttctgcgcgtaggcgaggttcttctcgcacatcggcgcggccggaatgtacatcacatttccccagccctgctgattttccaccggcgccaccgagtgaatgatgtcgcagtgccaccagacggagtccccggcattcagcgctggaatcgagcttaacgctttaattaagagcgggtgccactgctcagagatcggcagcactctgcccggcgcaacgccgcacagctcatcttccggcacatcgtcgagcagggggcgcagcagcacataagccatcgcctccgggatcggcaccacgtgcagcagcccctgacccgggatcatgtccgacagcgcggtccagccctggaaggtgcggaacaccgagcatttggtggtgttgtcgacggtatactcttccacttcggtacggtgcgcggcgtcccacgggtcgtaggcgtcgatattgccattaaaaacgttggcgaaaacctgctgataggcgggaagcagccagcgctccagcgcgccggaatcggtatgcgcccccagccccttcgaagtggttcccggcgggcggcggcggatgcggtcgggatagatcacgctgacgtccggatcgaaccagcgtttgccattctgttcaaaacgccacaggcggttgaggaaagattgcactgccgccatttcatcgctctgccgcgcctgcatttgcgagggcgaccagtagatcgggtagatctccgggcgcgaagcctccagcgaaccgaagaagctgtcgccaggccctttgtaaacatcgtcgaaatggttgcgatccagatattccagcatcgcggtatcccacgccagcgcctgttcgcgtgggaagtggcctttaatcaccgcgcagccacggcgcttaatggccgcgcgctgctcatcgctcactgttccttcggcgatatcgcggaacggaatggttggccagacctcctggcctgcggctttcagtgtctcaatctcctgcaaccgctcgctgatgcgcgctgagagcttatcgaacaccgcctggacgtcgccaatttgcgcccgcagggcctgtttcatctggcgaatcgccgctttgtgatcggcgggaagtgtttcgtgggtcgggagagcagccataataacctcgctgtatctttcattcgaaagtatgaaatattacaaacgttaatttaagttaaaatggagttaatgcaagtttaaaatcttgctgcggcgcacaaaatggaaaaccggggcgcgatgccccggcgaagggtcaggcgttgaagggcggggtgttatcgaggacggcctggataacgttcagcgcgccgtcatggttattatcgtcggtagcgtagccggcgatggccttgatgctgtcggcagcgttacccatggcgaaagcgtatttcaccagcttcagcatttcggcgtcgttgccgctgtcgccgatggcgacgcattgctgcggcgaaagatcccagcgcttgagcaaacggctgatgccgttggctttatgcaggccagggataatcaaatcgacaaagccaaagccgctggtgaccggcttcatgatgccgtcgagcgacacgtgcagtttatcaatcagctgtgggatctcgctgtccggcaggttgagagagaatttaaacagcgtatcgtcgatggcgtgatagtcgctcacccgctgtaggcgatggtagtgcttcgacatcagctcaacaaaggcgtccggagctttatcgctgacgtaggcgctctgcaggccgcaggcgacaaagttgagctgcggatctttgagcaattcgccaatcaccacttgtgattcgtggcgggtcagttcgccgtggaacagctgcttgccatgttcataaaccagagcgccgttttctgcgacgaatgaaatctgctcgcgaatttccgggaaaaatgagatcagctgatagtactggttgccgctggcgacaacaaattccataccttgctgcctgagctgcgcaaactgggcgaggaaacgcgggcggtcgtactgcttggcgtcattgagaaaagttccgtccatatcggtgacgataactttaacggtcataagagagtgctcctggcttaacttcgaccagtaacattctaattacaatgtgatggggagcacaaatttatttcgaatgaaagttcaggcattcagaaaatgccggaagggcatgtcttttccggcctgcagaacaggattggcccgctaagcatagcgccagcgggcacgaaggattacagcgtatgttcggtacgggcgataatatcgtcctgggtatccggcgacagggcggtgaagaacgccgagtatccagcgacgcggaccactaaatcgcggtactggtcaggatgtttcttggcttccagcagcgtgtcgcgcgacacgatgttgtactggatatgccagcctttgtgcacctcgaagaaagtgcgcagcagcaccatcagcttctgcttatcggactcgttctccagcgttgacggattcagcttctgattaagcagcacgccgccgaggatcgccccggtcggcagcttgcccaccgaactgataaccgccgtcggccccagatggtcggtaccggaggccgggctggccccctccgccagcggggtatgcgctttacggccatccggcgtcgccatggtctgcgcgccgaacgggacgttagcggaaatagaggaggtgccagcgtaataattgccgccaatcgggccgcggccatagcgcggattgtgatactgcttcagctcgtcgatataggtctggtaggcccgcgccagcaactcgtcgacgctgtcatcatcgttaccatacttcggcgcgccgttgatcaaccgctggcgcagctgctcgtgggtcagaccgtcgaaatcttccgccagcgccttcgccagctcctgctggccgatggcgccctgatcgaagaccagttttttcaccgccgcgaggctgttgccgaggttggcgatacccacctgcaggccggaaacccagtcatacttcgcgccgccctgcttaatgcttttcgcccgttcgatgcagtcatcgaccagcgccgagcagagaatatcgtggacgttatcttccagcatggtatcgaccacgtactcaatctcgatggatttacgggtgtagtaacgaatctggcggtcccagtcggccagcacctgatcgaagttagcgaagttgcctttcgacagggcgtgctcctgcggcaggaacacctgaccgctggtggcatcgcggccgccttccagcgtcgccagcatcacccgcgcgaagttaataaagctcatgccggtgcagcggtagccccacttaccgccgaccgcggtttcgatacagccgatagccgcgtaatcgtaggcgtcctgcggctcaatgcccagcttaatgaattccgggatgacgatttcatcgttgttaaacgccggcatgccgaaaccgcagcggatcacctggacgcaggcgtcgaggaagtcgttgctcatcccggcgtggtagcgcacgctgaggttcggctgggtagaacgcaggcgaccacaggattccaggatcgcatacgacagcgggttgaccgcgtcctgcggcttaccatccaccagattctggccgccgatggtgacgttctggtatagcgggctgccggcagaggctttggagtgtgagccggaacggatcttattgacctccagcagcttcagccagcagctgtgcagcagctcaatggcctgttcgcgatccagcgactgttgcaactcaacgtcgcggcggtagtacgggtagaggtactggtccatacggccgaaggataccgaatggccattggattcaatctgcaggataagctgaatgaagtagcacagctgcagcgcctgccagaaggttttcggcggctcatgggcgatgacgtcgcagttttcggcaatcgtcagcagttcgtggcggcgtgattcgcgggattctgctgtcgccatctcgcgcgccagcgcggcgaagcgtttgctgtgatcgctgaccgcttccagcacgatatcaatcgctttcaggaactgctcgccatgcaggtcttctagtaccgtcaaattgatacgcgagcggcgttcggcgactttcgcacgcatcccgtcgagccctttctccagcagcagggggtagttgaccgcgaggtgagcatccccggaggtcatattgccttccgccttaataatgccggtggcgagcagcgccttttgctcatcggtgaacataccgtagcagcggtcttgtacggtctggccgcgccaccatgggcacacttcatgcaatacgcgtttattctcctcgctgaccgagaagccggcgccggggcggtcggcgagatcgtcgatctctttctcaatccagctgacggtgtattccgggaaaataggcgcggcgcgcacttcgctggcctggttaccgacgatcagctcatcgtgcttgatccagatggtgcgctccgccaggtggtgagccagcgccagcgcgcggcgcaccgggatcggtttatcgagatgccgctgatacatctccgtatagtggcgggcgcgctcggtacagaccggcggcttgacgatatgcaccagcgccattttatgggcctggatacgggcgctgagggtgttgagcttcagggtagtcatagggttatcctcgtaatatcgccgttagccccttgctttgcgcataatcctgcgcgaaggcgagcagctcaggagcatccagcggtttgtccggtgcggtgtagggctgactgagtaactggtatttgttcattcccagcgtgtggtacggcaggtaatggatctcgctgacctgcaggcggtcggcggcaaaatcggtgatcgcggcaatgtcggcttcgctggcgttgaatccctggatcaacggcacgcgaataatcatttttttccccgccagcgccagacgctgcaggttatccagcacccggcgggcgctgccgtcggtccactgctgaaaaacggcctcgtcaacgtgcttcagatcggcgagaaacaggtcgacaaagggtaaagacggttcaatgtatttccacggcacgtgcaggcaggtttccacggcggtgtgaatgcctgcctgatgactggcttcgaacagcgcttgcgccagcgttgggttcataaagggttcgccgccggaaagagtgacgccgccgccgctgcgatcgtagaatggtttatcacgcagcaccgtcgccatgatctcctcgacgctcttctcctcgccgcacaccgtgagcgcggtggtggggcagcagtcgcgcagcgcggcgatatggctgtcgttaacgttttgccggtgaatgatcaggccatcgagggtgcgggtgataaccgccggcgccgcctgctggcacagctcgcagccggccaggcacagccgcgagtcatacagcagatcttcgctacgggcgcggctctccgggttctggcaccagcggcagcccagcgagcagcctttcaggaagacgacggtgcggatccctgggccgtcatgggtggaatagcgctggatgttgaagatcatggcttatcctcttgtttgcgtatgaacataaaaacactttcgaatgaaagttatgttgacgcaaatcaacaagcgggatggggataagtcagagaggagaaaataacgagagcggtcacaaaaccaccggcgactctcgtcgccggtgtgagggtcagtgcgagccgcatacctcgcactgcgggtgacgcatcagcctcatttcgcgaaactggcaggtcatggcatcgtagatgacgatttttccgctggcaggggtgccgtagccgctcagcagcttaatcgcctccatcgcctgcagcgaaccgatggtgcccaccagcggggccattaccccggcttcgacgcaggtgagggcattttcgccgaacagacggctcaggcagcggtagcagggttcgccatcctgataggtaaagacgctgatttgcccctccatacggatcgccgctccggagaccagtggggttttgtgctgaaagcagccgacgttaagctggttgcgaatgtcgacgttgtcggtgcagtcgagcaccagatcgtgatcggcaatctgcgccgccagcgcggtctcatccagcaaggcattgagcgggaccagacggacgtgcgggttaatgcgcgccagcgcctcgcgggcggaatccaccttcggctggccgagggtggcgtcgctgtgcagcgtctggcgctgcaggttggagagcgagacagtgtcgaaatcgagcagggtgagctgcccgaccccggcggcggccagatactgcgcggcggcgcagccgagcccgccgaggccgaccaccagcacgcgagcggcttttaaccgctcctggccgtcaaaatcaaaaccgcgcaagacgatctgccggttatagcgcagcatctcttcatcgctcagctcaacggtcattacagccccccaaacaggtgactgaagggttcgacctcgacccattcgcctgcttcaacatggccgcgctcacgctccagcacgataaagcagttgccgaggctgaaggagctgaaaatgtgcgagccctgatggccggtggtgttcaccaccagttcgccgtccgggttacgctgcagaataccgcgctgaaaatcgaggcggccaggcgactttttcaggcgcgtggcggcgcggacccgcaggcggggcgcctgaagcgggccgtgcttgcccgagagtttcgccagcaggggttgcaccagctgacagaaggtgacggtggcggacaccgggttacccggcaggccgcagaaccagctgctgctgagcttgccgaaggcgaagggtttccccggcttaatcgccagcttccagaagccgatctcccccagctcttcgaggatagttttggtgtaatcggcttcacccaccgagacgccgcctgagctaatgaccacatcggcctgctggtcggcggcgataaaggcgtcgcgcagcttcgccgggtcgtcaggaataatgcccaggttaatgacctcgtagcccaactgctgcagcatcaggtgcactgccaggcggttggtatcgtaaatctggccgtcgccgagcggttgacccggcagctgcagctcatcgccggttgagaagaccgcgacgcgtaccttgcgcaccacctcgacctcggcaatgcccagcgaggccagcaccggcagctcggccaccgtcaggggtgtccccgccgggaagaccaccgcgccttgggcaatatcttctccgcggcggcgaatatgctgcccggcttttaccggcgcgataaagcgcacaccggcctcggtctgttcggtctcttcctgcatcaccagcgcatcgcagccttccggcaccggcgcgccggtcatgatgcggatacaggtgcccgacggccaggcgtcgttgaacggctggccggcgaaggccttaccggcgaccggcagcgcggcgccgtcgcgaaggtcgttcagccggacggcatagccatccatcgccgcgttatcaaagccgggcacgtccagcggggagacgatgtcatgggcggtcacacgcgagaaggcctgcaacagcggtacagtttccgtcgcgttcagcggcgtaatacgatcgagcatctgggcgagggctgtgtcgagcggcatcagtccggcggtaaaatccatgggtcactcctgcgggcaaaacagcgaaaacgcctattatggcagaaaagcggcgcgggctgtatgccacctgggtacgaggctttacatcgcccgccgctctttctatattcaaaaattgtataagacattcagcaatataatgatatcaatacccttattcatgacgtgaccggcgccgcgccgcggtacgacagggcaggggcgatccacttcatcgttaaggactggcgaaatgggcaaggcggttatagcaattcacggcggcgcaggggcgatttctcgcgcgcaaatgacgccggagcgggagcgagagtatgtggcggcgctgtcgactatcgtcgaaagcgggcagaaaatgttggccgcgggcgccagcgcgctggatgccgtgaccgaggccgttcggctgctggaggagtgtccgttgttcaacgccggaatgggcgcggtatttacccgcgatcaaacccacgagctggacgcctgcgtaatggacggctacagcctgcaggcgggcgcggtagccggggtcaaacatttgcgtaatccggtgctggcggcgcgtctggtgctggagaagagtccgcacgtattactgatcggcgagggggcggaaaattttgccatctcccacgggatggcgcgcgtgtataacgatctcttttccactcctgaaaggctgctgcagctgcaggaggcgaaagcgggcggggagattatcctcgaccaccacgccgctcccctcgacgaacgccagaaaatgggcaccgtcggcgcggtggcgctcgatctggccggcaatctggcggcggcgacctccaccggcggcatgaccaacaaactgcccggacgcgtcggcgacagcccgctgccgggcgcggggtgttatgccaataatgccagcgtggcggtctcctgtaccggcaccggcgaagtctttatgcgcaccctggcggcctacgatatcgccgccctgatggagtatgggcagcttagtctctattccgcctgcgagcgggtggtgatggagaaactgccggctctcggcggcagcggcgggctgatagccgtcgatcgcgaaggcaacgtcgttttaccgtttaacagtgaaggcatgtaccgcgcctggtgctatgccggcgatacgccgaccattggcatttatcgcgaatagaacaagggagagggcgagtgtcgcaaactcacgaaaccgatacctgcgaagtgctggtggtgcgcaacctgaacgtggcgttccgccagcaggatgcgccggaggtgcaggccgtgcgtcagctttccttcagcctgcgccgcggcgagacgctggcgatagtgggtgagtccggttcgggaaaatcggtgaccgcgctggcgctgatgcgtctgctagacgcggccagcagcgaggtgaacagcgaggggctgtggttgcggcggcgtaaccggcaggtgatcgcgctcaatgagcaaacggacgctgagatgcgccgggtgcgcggcgcggatctggccatgatttttcaggagccgatgacctcgctgaatccggtttttaccatcggcgagcagattgccgaatccctgcgcctgcaccaggggctggggcgcgaagaggcgctgcgcgcggcgaaaaagatgctcgatcaggtgcgtattcctcaggcggaagagatgctctcgcgctatccgcaccagctctccggcggcatgcgccagagggtgatgatcgccatggcgctctcctgtcggccggcggtgttgatagccgatgagccaaccacggcgctggatgtcaccatccaggcgcaaattctgcaactcattgccgttctgcaaaaggagatggcgatgggggtgatctttatcacccacgatatgggcgtcgtggccgatatcgccgatcgggtgctggtgatgtatcgcggtgaggcggtagagaccggcagcgttgaggagatctttcgttcgccgcagcacccgtatacgcagtcgctgctggcggcggtcccgcggctgggggagatgcgtggccaggatctgccgcgccgttttccgctgccgggccagccgctggcggagagcgaaacgcccgatacggtagtcgccggcgagccgatcctgcaggtgcgtgacctggtggcccgttttccggtgcgcggcgggctgctcaatcgcgtgacgcgcgaagtgcatgcggtggagaaggtcagttttgatctctggccgggagagaccctgtcgctggtgggcgagtccggctgcggcaagtcgaccaccggccgggcgctgctgaggctggtagagacccagggaggcaccattaccttcgacggtcagcggatcgataccctcgccggcggcaagctgcaggctctgcggcgcaatattcagtttatttttcaggatccttacgcctcgcttgatccgcgtcagacggtcggcgattcgattatggagccgctgcgggtgcatggcctgctgcgtggggaagcagcgcgtgagcgggtcgcctggctgctgaagcgcgtggggttgcagccggagcatgcctggcgctatccccatgccttttccggcggccagcggcagcggatctgcattgcccgcgcgctggcgctgaatccgaaggtggtgatagccgacgagtcggtgtcggccctggatgtctccattcgggcgcagattatcaatctgatgctcgacctgcagcgcgagatgggcatcgcgtttctgtttatttcccatgatatggcggtggtggagcgcatcagccaccgcgtggcggtgatgtatcgcggtcgcattgtcgaaataggcccgcgccgcgcggtgtttgaaaacccgcagcacccctatacccgtaagctcatggccgccgtaccggtggccgacccgggccaccgtcatccgcagcgggtcctgctgtctgatgacgtcccgggcaatatttataagcggggcgaggagatcgccagcgtgccgttgcagcaggtcgggccgggccacttcgtcgcccgcgaatccgccgatgtgctgggcagaacataacaacacataacgcatcttttcaggagaacacgatgacacaacctgtttcacgcaaatggtggctggcgctgagtatcgcggcggccctggcgagcgctcccgcctttgccgccaaagatgtggtggtggcggtcgggtctaacttcacgaccctcgacccctatgatgccaacgataccctgtcgcaggcggtggcgaagtccttttatcaaggcctgttcggccttgataaagagatgaagctgcaaaacgttcttgctgagagctataccgtgtcaccggacggcctggtgtacaccattaagctccacagcggggtgaaattccaggatggcactgactttaacgccgaggcggtaaaggctaacctcgatcgcgcgagtaacccggataaccatctcaagcgctataacctatataaaaatatcgccagcaccgaggcggtcgatccgactacggtcaaaattaccctgaagcagcccttctcggcgtttattaacattctcgcccatccggcgacagcgatgatttcgccggcggcgctgaaaaaatatggtaaggatatcggcttccacccggtgggcaccgggccttataagctcgacacctggaaccagacggattttgtgaaggtcagcaagttcgatgggtactggcagccggggctgccaaagctggattctatcacctggcgtccggtggtggataacaatacccgggcggcgatgctgcagaccggcgaggcgcagttcgccttcccgatcccttacgaacaggcgccgctgctggcgaaaaacagcaaactggagctggtggccagcccgtcgatcatgcagcgctacatcagcatgaacgtgacgcagaagccgttcgataatccgaaggtacgggaagccatcaactatgcgattaaccgccaggcgctggtgaaggtagcgttcgccggctacgccaccccggcgaccggagtggtgccgccgtcgatcgcctatgcccagacctacaccgcctggccatacgatccggcgaaagcgcgccagctgctgaaagaggcgggctaccctaacggtttcagcaccacgctgtggtcatcacataatcacagcaccgcgcagaaagtactgcagttcacccagcagcagctggcgcaggtggggattaaggcgcaggtgacggcgatggacgctggtcagcgggcggcggaagtggaaggtaaagggcagaaagagagcggggtacggatgttctataccggctggtccgcctccaccggtgaagccgactgggcgctgtcgccgctgttcgcctcgcaaaactggccgccgacgctgtttaataccgcgttttacagcaacccgcaggtggataacgcgctgagcgaggcgctgaaaaccaccgatccgcaacagaaaaccaaactctataaagaggcgcaggatattatctggaaagagtcgccgtgggtgccgctggtggtcgagaaactggtctccgcccacagcaagaacctcaccggtttctatatccagccggataccggctttagcttcgaacaggcggacctgacgccgtgatcatgttcatcttcatgcgtcctctctcccggaatgggagggagcgatgctgaattatgtgattaagcgcctgctgggcctgatccctactctgcttatcgtcgcggtgctggtgtttctgttcgtccatatgctgcccggtgacccggcgcggctgattgccggacctgaggccgatgcccaggtggtggcgatggtgcgccagcagctggggcttgaccagccgctgcatgtccagttctggcactacatcaccaacgtgctgcgcggcgattttggcatttccatggcctcgcggcgtcccgttgccagtgagatagccagtcgctttatgcccacgctgtggctgacgctggccagcatgagctgggcggtactgttcgggatggcggcggggattgcggccgcggtgtggcgcaatcgctggcccgaccgtctgggaatggcgctggcggtgagcggcatttcgtttccggcttttgcccttggtatgctgctgatgcaggtgttttcggttgagctgggctggctgccgacggtgggggccgacagctggcggcactatattttgccgtcgttgacccttggcgcggcggtggcggcggtcatggcgcgctttacccgcgcgtcattcgtcgatgtgctgcatgaagactatatgcgtaccgcccgggcgaagggggtgagcgaaacgagggtggtgctcaagcatggtctgcgcaatgcgatgatcccggtggtgaccatgatggggctgcagttcggctttctgctcggcgggtcgatcgttgtggagaaggtgtttaactggccggggcttgggcgcttgctggtcgattcggtggagatgcgcgattatccggtgattcaggcggaagtgctgctcttttcgctggagtttattcttatcaatttagtggtggatgtgctgtacgcggccataaacccggctatcaggtataagtaaggtgcgattgcttaactggagaaggcaggcggcgctgaacgccatgccgggcatcagacccggcgagatccataccccctggcatgagttctggcggcgctttcgtcgccagccggtggcgatgggcgctggtattttcgtgctgttgctgattgcggtagccatcgttgccccatggatagcgccgtacgatgcggaaaattatttcgactacgaccgtctgaacgagggaccttcgctggtgcactggttcggagtcgactccctgggacgggatattttcagccgggtgctggtcggggcgcagatctcgctggccgccggggtactggcggtgctgattggcgcggccatcggcacggtgcttgggctgctggctggctactatgagggctggtgggaccggctcattatgcgactttgcgacgtgttgttcgcctttccggggatcctgctggcgatcgcggtggtcgccgtcatgggcagcgggatggccaacgtgatcatcgccgtggcgatcttctcgatcccggcgtttgctcgtctggtgcgcggcaatacgctggttctgaagcagcagacctttattgaatcggcgcgcagcatcggcgccagcgacgccaccattctgttcaaccatattctgccggggacggtgtcatcgatcgtggtttatttcaccatgcgcattggggtatcgattatttcggcggccagtctgtcgtttctcggcctcggcgcgcagccgcccaccccggagtggggcgcgatgctcaacgaagcgcgggcggatatggtgatgtctccgcacgtggcgctctttccggcggtggcgattttcgtgaccgtgctggcgtttaatctgctgggagatggcctgcgcgatgcgctggatccgaagttaaaggggtaggatgagggaaagctccgccgggagtcctttatgttatctgcggcttcagcgtagtttgcgctcccggttaatcgtctgcgttatgtctcttatggcgcagggagcgcacagggggcggccagtcgccgccgccccctgtacccccgggctccggccagcaacatcgccactgcgtggtgccttcgacttatccctgcaggcttcgggttgggccgaagcagcgtccctgcaaaacacggccctcagcccgcatccatgcggcctgcccctgcctttcgggaacgtctcagcgatgttgaggccgccagcaccggcagtttcagcaacaatggtgaataaattaacggcaggccgcacgaactgtaggccgggtaagacgttagccgccacccggcaatatgaaggcatgatgactgataaattacccggcggcgctgcgcttgcgcgggcctggggggatgagcctacgggaggaccccgtaggccgtggaatgcgctaagccgctatccgggaagctggactagacccgggtaccccacaggtcgtattcgtcggcgtgctcgactttcacccgcaccacgtcgcccggcttaacgcgggtttcgccgttcaggtacaccgcgccgtcgatttccggagcgtcggccatgctgcggccaatggcgccttcttcatcaacttcatctaccagcaccaggatttcgcgccccactttctcctgcagacgctcggcagagatctgctgctgcagctgcataaagcggttccagcgctcttctttcacctcttccggcacctggtccgccagctcgttggcggtagcgccttcaaccgggctgtacttgaagcagccgacgcggtcgagacgcgcctctttcaggaagtcgagcagcatctggaaatcttcttccgtttcgcccgggaagcccacaataaaagtggagcgcagggtcagatccgggcaaatttcacgccactgcttaatgcgcgccagctgacggtccgcagaacctggacgcttcatcagcttcagaatacgcgggctggcgtgctgcagcggaatatcgaggtacggcagaatcttgccttccgccatcagcgggatcacatcgtcaacgtgcgggtacggatagacatagtgcaggcgcacccagatgccgagcttcgccagctcttcgcacagactgaccatgctggtcttcaccggcataccgttgtggaagccggtgcggtgcttgacgtcgacgccgtaggcggaggtgtcctgcgaaatcaccagcagctctttcacgccggcgtcagcgaggcgtttggcttcggccagcacttcgccaatcggacggctcaccagatcgccacgcatggacgggatgatgcagaaggtgcagcgatggttgcagccttcagagatttttaagtaggcgtagtggcgcggcgtcagcttaaccccctgttccggcaccaggctcaggaacgggttgtgcttcggcttcggcgtataatggtggacatgctccagcacctgctcatagctgtgcggaccggtgatctccagcaccttcggatgcacttcgcggatctgatcctctttcgcgccgagacagccggtgacgattaccttgccgttctctttcaacgcttcgccgatcgcttccagcgattcctgcacagcgctatcaataaagccgcaggtgttaacgatcaccatatcggcgttgtcgtaggtcggtacgacgtcataaccttcggtgcgcagttcggtcaggatacgctctgagtccacgaggtttttcgggcagcccagggagacgaagccgattttcggctgatgcgtgacattgctcatagcttaaaaagtgttcaattattggaatggtcagggcaggaattctacagatctttgcgaaaaagagtatagctccgtcgcggttaatggtgaaaaagcgcccccgacctgtcttttacgccccccaccgccagagcggatcccacacgccccggagcagaggggcgggacacgcttctgacaagccgtgcgcacaggcggctcaagcccggcgtggctgccgggcagagacttattgcgccgggttaatggctgcggagggcgtggcgccggtttttttcggctcgcgcttatcctgcagcgtgaaaatagagatcagggtaaagagcccggcgacgctgccgagaatcagataggtgttggcgaagccaatggtatcgtacagatagcctgccagcggagagtaaatggcggtggcgatcgaggcgacgaacagcaccagcaaatagaccgtcgaagagagcttgtggtcgaagttggcggcgatgaatttaaagaccgataccagaatcaacggcttctccagagcatgcatcattttcaccgcaccaatccacaccgggccgaggggcacggctgagccgacaatacgtaccgacatgatcagcccggcgatgatcagcgcccatttggcgccggtccggttaacaaaccatggcatcaggcagaggaacagggtttcaccgcagacctgaatagacgcgaggatcccgtaccagcggttgccttcctccggcgtcgggaactgtagcgagaagtactgggcaaactgctgatcgtaggtgtcgtaaatctgcgtgacgaacagggtaaagagcagcagcatccagaactgaccattcttcgccagctcaagggcatgagagaccttcagcgattcgcttcgcgccacatcggcgtcggttaattcaattttggttagcataaagcagatggcggcgatgacaatggcgaggctggcgagccagaaggccagattaggattgctgtcgatatatttacccacaatccaggccgccgctgcccagcctaacgagccccacatccgcacacgaccatattcgaactgatagcgccgggaaatcttatcgatataagagtcgattactccgcagccggagttaaagatgatccccagatagatccctcccagcaaggcgccaaaccaaaagttgtgcaccagcagcggcgcgtaaacgtagataaagaaggggcccaccggcaggagcagggcgaccagcagccagataagccgttttttcaggccgaacttgtcagagataaagccgaagaaaggctgcatcagcagggcgataaaggcgttgaccgagtaaagcagcccggtcttcgtggcgctgatgccaagatgctgggtggtccagataacgaagaaagccatggtcgacgaccaggcgaacaggtagaggaaatcgaaaagactcaacagaaggtagtttcttttaccggacgtcatgtttcagttccttgcaaatgggcagagagaatttcagcgatccgcgggccgcgttcgctgttttcttgacatgttatacgtattacattaattatttgttatgacatcctaattgacgatggtgcaacaggtcatatgaggtattgtgatcattgctgcactaattttgtctcttattgccattttctgtttgttaatttcagattgaaattaattgtgaccgtataacattgtttttgttatacaccctacaatgcgttaaagttgccacattgtaaatgatgttaaagaactggggattattgacctggcgcatcattttgcacaaaaaataaccgtattatggaaagggtaaaggacgacagaggaggaaccgtgatgaccgttgacagactataccgccaccttctgcagaagcttattaacgccaatatcgatattgacgcctatctgcaactgcgaaaggccaaaggctacatgtcagtcagcgaaaatgaccatctgcgtgataacttgtttgagctttgccgtgaaatgcgtgcgcaggcgccgcgcctgcagaatgccatttcaccggaggagagggatgtccttcgcctggccggcgaatcggtcgccgccgctgcactatgcctgatgagcgggcatcatgattgtccgctatacatcgctgttaacgtagagaagctagaacgctgtctgacaggattgacctcaaatattcataaattgaataaattggcgccaatcactcatgcctgatcggctgaaacccaggggaagtgaacgcttcccctgttaaaggttatgtaaaaatccccgcgcaaatttccccgctggctaccctttagcccagagctgacgaaaggagaatgccatgcgtccgatcccactgctgttgatattgagcgccttagcgctaccagccctgagccgggccgcggtgcgggtggaggtattgcaaaaccggctggcccagccgtggggcatggcctttctgcctgacgatcagggcatactgatcaccctgcgcggcggcgagctcaagcgctggcagccgggtaaaggtctgtcggcgccgatagccggcgtgccgcaggtatgggccaacggccagggtggcctactggacgtggcgctggccccggatttcgcccagtcgcggcgggtgtggctgagctatgcggaaagcgacgccagcggtaaggcgggcaccgcggtgggctatgggcggttgagcgaggatgccacgcagctgacgaactttaccgtggtctttcgccagcagccgaagctctccgtcggcaatcattttggcggcaggctggtgttcgacggcaaaggatatgtgtttatcgggctgggcgaaaataatcagcgtgccaccgcccaggatctcagcaagctgcaggggaaagtggtccgcctgacggagaccggaggtgtaccgccggataacccttttgtcggccgggctgacgccaggccggagatctgggcttacggcatccgtaatccgcagggcatggcgatgaatccctggagcgaggcgctgtggctgaacgagcatggcccgcgcggcggagatgaaattaatattccgcaggcggggaaaaattacggctggccgctggcgacgcacggtattaactacagcggcctgcccattccggaagcaaaaggcaaaacggttccggggaccgaacctcccctgtatgtctggccggtctctcccggggtgagcgggatggccttttattcggcgccgacctttccccagtggcagcataagctgtttatcggcgcgctgaaggagacatcgctgattgtcctggcggtggacggtaatcaggtccgcgaggaggggagattactggaggcgcgcggaaaacgcatccgcgatgttcgcgtgggacccgacggctatctgtacgttttaaccgacgagtctaacggcgagctattgcggttgagtcccgaggcttagcctcaggtcaccgggatctgcactacttcgcgccaggcaggacgttggctaatctgctgataccagcgctgcagatggggccgcggttgccagctgtcgaggatcgacaacagattgtagacgaagggagcgacggcaatatcgccaaggccgaactgctcgccggagagccacggcattttggccagttcgtcatccagcatggcgaacagcgcttcgcaggcgctgatccccgcggcgatggccgccgggtcgcgctgctccggcggcgttctcaccaggcccattaataccgggcgatgggcgggtgagagggtgccgttggaccaatccatccacttttccccttgcgcgcgctgcgccggcgcggcaagccacagacggtcaacgccatactgggccgccaggtagcgaataatcgtatttgattcccacactaccaccccggtggcatcgtcctttaacagcggcaccagcccgttcgggttcatcgccagatattccgggtcatggttgagaccaaactccagcccggcgaggatctgctgataaggcagatccagctcctccagcacccagcgtactttcttcacgttggtcgagttattacgtccccacagtgtaatcattttcgctcctgagtttgtttcactgccgttgcagcgcgatcggcgatcatgttgggataaagttaaaaatccggcaagcttttttatttggctgttattaaaggtttttatgcttactcccttcagccaggggcactcctgggtcacagggcccggaaagtgtttttactattttacaggagtaatatctatcgggtgttacgctacgaaggaaagggcgtgaatatggtgtatcttattgataattaaagctttaaattaggcgtgcatctataaaaacgctccctctccgtctcggttaaaatctcaatgtcgcctgagggtataatttgatgctgattattgcatcgcaatcatctgaggaacacaggttaatattaataaatagaaagtcagtgaaagaattattttttttacagggatgaactgttgtttttatcgatcggatatacatctttctcatcccacccagaaaaaatagaccatgagaggcgccgactggctggaagatattctgaaaaatagcaaaaaaaacccagtgactggcactggggagtaaatttactcagggttgcatgctgttctcaagataatattcgagtctcgaagtatgggttaaccaaaggtaaccatcaacttccatacagactacatgggaaatatactgtattaaataaccaggaatccacccttacttttgtgctatttatcttacctgggtaatcactgcgggggtaagtggtatataatgcaataatcagtatttgaatctatagcgttaaacgagcagagcctggtagaggactttactttccccggaaggatttgaaaaaggcggttaaaatgaatgactgataaggatggccagcatactatcgcggtgctatcaaaacatccctgcaaaacgaaatagggataaaagaagcactggcgaactgcagtctggaagagcgagtcgtagagctcgatatggcatcggacgagaagggtaggagattacccgggaagagatgttaatcttttcatcaaaccggcgtgattaataacgggcaacagaatcagagcggcccggggttttgagagcaatacttctgtaaaggccacggctgtggatgcgctgttatgaatgtatttgtaaaatttatcacgatccagagtcgccttgaaaaaaaaagcccagcgacaggctggggtgtaattacacgcataaagggatatgccattttcaacacaatatgcgaatcttaatttatggaataactgcgggtgagctacccgcttccataaagattgcaggggaaactatactgtatttaatgaccaggaatccatccgtatcgatgtgctatttttcttacttgtgtaatacggaaagtgaaaatagcccgataaactattttttaccgatatgccgactaaaacagggaagccgtctgcctgcttatccagtgggcgaataattcatatcattagcgggaggctctcccttcctgacctcaatccctgatggtggcgtatagaggggatagctgattgatatcctttatcaaggatattgcgcctccatcggcggaatgctatggcaatcgaagccttgctgaacatggcgatcaggcaggcccgatggagagaaaagtgcgggcgttgttgctaatttcctgagacgggcgtaatgaccgtctcaagcatagcccgggagttctcaactgcatttcaggcgtaaatacggcctacagaaccttcaggtttatatttaagcgtctgagacttctacagcagcaagccagatgtggttattgtgagttcggaagttgaactgggcctcatggaatgcaaccgggccgacattttgagttttgtgaagggtatcagcagtaacaaccatccccggttctcaggtgaagggggtaggggcgaggcgactggatatcactggccaggctttcgcttaccccacacggccccgccataatgtgaatctatgaccaggcaaaccacgatgaaagacacgctcgcgacgtctctttagtagcatttttcccgaagacaagttagctatgtcattgaaatttcggtgactaattggttttgaaaggcgatttttttcttgccataataaagttaacattaaggcgattacgatcaaaaaaattgttctgattaaagcacagcggcatgttattgcgtaaactttaaaaactttaccaactcgctgtttctttaaggtcatttgtacgctttactcaccggttgctgcggcgcggtcagagtggcgcggcatattttgtttggaaaggatacttgggtggctcttatgatgcatgacgctttttcccttcgcggcctcgcggcaggttgcgcgctgttatttcttgtcgcacctgcggtgcaggctgcggaacaactccccgacgccccttcaattgacgctcgcgcctggatcctgatggactatgccagcgggaaggtgctcagcgaaggcaatgccgatgaaaaactcgacccggccagtctgacgaagatcatgaccagctacgtggtagggcaggcaataaaagcgggaaaaatcaaactgaccgatatggtgaccgttgggcgcgatgcctgggcgaccggcaacccggcgctgcgcggctcatcggtgatgttcctcaagcctggcatgcaggtttccgtagaagatctgaacaaaggggtcatcattcagtccggtaacgacgccagcattgcgattgctgactacgtagcgggcagccaggacgctttcgttagcctgatgaacggctacgccaaaaagatggggctgaccaacaccacctttatgaccgtccacggccttgacgcgccggggcagttcagcaccgcccgcgatatggcgctgctgaccaaagcgctgatccacgacgtaccggaagagtacgcggtacataaagagaaagagttcactttcaataaaattcgccagccgaaccgcaaccgcctgctgtggagcagcaacctcaacgccgatggcgtgaaaaccgggaccaccgccggggccggctataacctcgtctcctcggccactcagggtgatatgcgtttgatcgccgtggtgctggggaccaaaaccgaccgcattcgctttaacgagtcagaaaaactgctgacctggggcttccgcttctttgaaaccgtgacgccgattaaaccagatgccaccttcgttacccagcgcgtgtggtttggcgatagcaatgaagcgaaactgggggctggcgaggcgggctctatcactttgccgaagggccagctgaaaaacctgaaagccagctataccttaaatcagccgcagcttaccgcgccgctggagaaggggcaggtggtcgggactatcgactttaagctaaatgataaaaccattgaacagcgtccgctgattgtcatggagtcggtaaaagagggcggcttcttcagccggatgatcgacttcgtgctgatgaaactgcacggctggttcggcagctggttctcctgatgcctgcccgcgccctgcggggcgcgggcagcgacgcttcaatacagtagggaaatctgctgcgccttcgccagcgcgaccagctcatcatccgggcagatatcgctggcaatcacgtcaaatttcgctaacgcccccatgcgcgccggacgcactttgccaaacttgctgtggtcgaccaccagcacgtgatagcgcgcgtgacgcatcgcccagtgcttaaccggcagctcttccaggttatagcaggtcgccccctgctcgcagtcgatccccgccgccgagtaaaaggcgatatcagggctcagatggctgagggtatcctcaaggctcagcggcataaaaatcgcgttgctggcatgaaactccccaccgcacaggaccgcgcggcactggggtttttcctgcagggccagaaaggtgttcagggagtagcagacgccggtgaagggcagggcatcgtcaatggcgtcaataatccacggcgtggtggtcccgcagtcgaagaaggccatctgatgggcctccagcagcgcggccgcatggcgagcggcacggcgtttttcctcgaccagccgggttttttgatcgctgagcagataatgggtggcgctgcgcggctccagcacaatgtatccgccgagcagcacaaccgggccgctgtggccattgaggtcgcgacgaatggtcatttccgacaccccaagcagggaagcggcttctttcagatgcagcttatcgctgcgtttaagtgcctgaatgagctgactgatacgttcgtcacggcgagtttccatattccctctgcgctaaaatcgccctgcgggggcagggcgttagcgggattttacctgtcgcttgcgggttagtcacgcggtggccgcagcgacggcggcgtttagccgcgcacccagcctttgcggattggcaaggagaagcagagacgatacagccgctgcagctgatggtatagcgccgggccgaacgtgtgccagatcagcgccgcgccaaggcagccgcacatcccggccagcagcccgccgaccatatccagcggccagtgcacgccgagatagacacgggaccaggcgatggcggcggcaatggccatcagcagggcgccggaccacaggcgatgccagaacaggaaggccagggcaaaggtaaagctgacggtgccatggtcgctggggaaggagtcgtccgccgcgtggtgcaggaagttatagcctacgccggcgacaaacggccgatcgtgcggatagaggtggccgatcgcccacgacacggtcaggctgatcgtcagcgccagcatcagcttaaacaccatctgccgctgggcaggcccccacagccacaatgtcaccaccagcagaggcacgatcagaatcagatctttagcgatgaagatcgccatctcaatggcccactgcggcgaggcaggcgtcgcgttgagcagggcgaacagcgcatagttaatattttccagcatagacttccaggctcgttggtccgatagcaattaagccgcctaccctaaataaaagcggtgcggagataaaggcggcattgtcttaaagatcaggttgttatgaaatccactaccataaagtctacggctaacagcctgaaaaacgtcagtatatcgtttgtcacattgctgaaacataaacggaatatatacacaggctgaataacaggggagaggcgggacgatggcgcacggctcgtaatattgtgcggtgtcacccacaattcactatctccgcgccgggagtttcattacactttgcgcgatttttgatagataagagatttcatgcaaaattattcgctttcaggccgccgcctcggaaggcaggcgctgttgttcccgttatgtctggtgctgtacgagttttccacttatatcggcaacgatatgattcagccgggcatgttagccgtggtgcaggaatttcaggtgggcaacgaatgggtacctacttcaatgactgcctatctggcaggcggcatgtttttacagtggctgctggggccgctgtcggatcgtattggccgccgtccggtgatgttgaccggcgtagtatggtttatcgtcacctgcctggcgacgctgctggcgcagaccattgagcagtttaccctgctgcgcttcctgcaggggatcagcctgtgctttatcggcgcggtgggctatgcggcgatacaggagtcctttgaggaggcggtgtgtatcaaaatcaccgccctgatggctaacgtggcgctgattgccccgctgctggggccgctggtgggcgccgcctgggtgcatgtcctgccgtgggagatgatgtttgtcctgttcgccgtgctggcggccatctcgttcttcggcctgcagcgggcgatgccggagaccgcgacgcggctgggcgaaaagctgtcggtgaaagagctgggccgcgactatcggctggtgctgaagaacctgcgcttcgtcgccggcgcgctggccactggctttgtcagcctgccgctgctggcgtggattgcccagtcgccggtgattattatcagcggcgaacaggccaccagctatgagtacggcatgctgcaggtgccgattttcggggcgctgattgccggcaacctggtgctggcgcgcctgactgcgcgtcggaccgtgcgctcgctgattatcatgggcggttggccgatcatgtttggcctgatcctctctgcggcggcgaccgtggtctcttcccacgcttatctgtggatgacggccggtctgagcttctacgccttcgggattggcctcgcgaacgccggcctggtgcgtttaaccctgttcgccagcgagatgagtaaaggcacggtctcggcggcgatgggaatgctgcagatgctgatcttcaccgtcggcatcgagctcagcaaacatgcttacgagctgggcggcaacgggctgttcagcctgtttaacctgctgggtggggtactatggctggggctgatgatttactttctgaaagataaaagcgtcggcaattcgcagcaggggtagttgttttcaacccggatgcgctcacatccgggtcttatcaggcgaacggcgcttcgcgatccaacaccttatcaataatctgcaggacaccttcttcgttgttatgcggcgcctgatagcgggcgacggctttgacgtcttcccgggcgttggccatggcaaagccaaacccggcgtgctgcagcatttcgatatcgttgccgctgtcgccgaacgccactacctcgtgatcctcaatgccccagcgctgctgcaaaatgcgcagcccgttggctttgtgcacacccgggataattaagtcgatgctgccgtagccggtggccaccgcggtgaccatgtcccccagcgccgcgtgcagcttcggctgaatttccgggatcaggctgtctggcacgttgagaccaaatttgaggatggtgtcatcgagatggttaaaatcatccaccagttcaaggcggtgataatacttcgccgccaccgtcttcagcgcgtcgttgtagcgattgagggtgtaggcgctgcgcttcccgcaggcgatgatttcgatattcggcaacgtctgcagatggtcgaccacggcgttgaagtggtgaaccggcagttggcagttgaagacgtcttcattgccgctcaccacccagccgccgttttccgccacgaaggcgatctgatgggcgatctccgggaaaaaggagatcagctgataatattggttgccgctggcgaccacgaagcgaatattctgttcgcgcattcgctggtactgggcgaggaagcgcggccggttgtaagttttggcatcgcttaaaaaggtgccgtccatatccaccgcaatcagtttgatgctcattagctgttctccataacgggttcagattgtggcttagccaccgcgcgggcgaccagcgccgccaccatcaccagacccagcaccaccatcatggcgctgcgcaggccgaagtgttcgccgaggaaacccagcagcggcggcccgacgaggaaagcgagatagccggtgatcgccaccacgctgacgcgcttgggcgcgtccggcccggtatcgctggcggcggagatggtcagcgggaagccgagcgaggcgccaatgccccacagcagcaccgagatgcccgccacccaggggttatcgacgaagatgatcaggcctatgccgagggcgcccatcactgcgctgccgcggaccaccgccacccggctgtagcgatcgataaaccagccgccggtaaagcggcccagcgtcatgccgagggtgaaaccggcataaatcagggagccggaggtggggctaaagccgtggccatccaccatcagcagcggcagccagtcgttggccgagccttcggcaaaggccatcgccaggacaatgacgccgatcagcagcagctgcgcgtcgcgccacaccggcagacctttcgcctcaccgtgggcgacttcggcggcatttttaccggtgccgtcgggaatggcgcggatagcaatggcgatgggcaggatagccaccagcgcagccgccaggatgtgcggggcggccggcagaccgaatccggtcactgccatgcccaccccggcgccgaacagggtgccaaagctgtagaagccatgcatcatcggcagcaccgttttattcatctcccgctcgatcgccgcgccttcgacgttaatagcgacttctgcagagccaaagctggcgccgaagatggccaggccgaaggcgaacagcggggcggaagtgacccacagcgccaggctgagcaccagcatgccaagcacggcgaaggacatggtggtgcggatgaccttgcgggtgccaaagcgcttcaccagccacgccgagcagagaataccgctcatcgaccccaccgacagaccaaacagcaccacgcccatctctgcggtggatagcgccaacagatcgcggatcgccggcgtgcgggtggcccaggaggccattaacaagccggggatgaaaaagaacataaacagcgcccatagccgaagctgcagcgctctgcgcgaggattgcgtcgtcatccgtaaacgccttaaaggagaagagtgaagacaacagtagcaagtatgtgtacatttgtacataaaccggaagaggaaaatcatggcccgtagaccaaacgatccgcagcgccgcgagcgcatcctgcaggcgacgctggataccatcgcggcgcacggcatccatgcggtgacgcaccgtaaaatcgccacctgcgcgaatgtgccgctgggatcgctgacctactatttcagcggcattgaggcgttaattgaggaggcgttcagcctgtttaccgccgagatgtcggcgcagtatcagcaaggcttcgtcggggtaacgaaccgggaacaagcctgcgatgccatcgcggatctgatcttcagcgcccaggtgaccacggcgcgcaatatggagctgatgtaccagctgtacgcgttctgcagcagtcagccggcgctgaaggcggtgatgcagaactggatgcggcgcagccagcagacgttggagcagtggttcgcccccgataccgcccgcggtctcgacgcctttattgaagggatgaccttgcactttgtcaccgaccgcgcgccgctgtcgaaggcggcaatccgcatgatggtcgggcagctggcgggggagagggcgcaggaagaggggcgctgaagcggcgtttcacccggaatggctaaacgcaggcaacaaaaaacccatttatgtaaacgggttaatgaaaacaataagttagattaaaaacaataagttagattggtggtcagtggtggttattacggggtaatgccaaccgctgccgccactttgtcgcctcttggcagcgttgccagaggattgaaacggagcgccgtttccagatgatccggtgccagatgtgcgtaacgcatagtcatttttatatcgtggtgtccgagaattttttgtaaggccagaatgtttccacccgacatcatgaagtgcgccgcaaacgtatggcgcagaacgtgtgtgagttgaccgcgagggagcacgatagacgttttttccatcacggataaaaattgaaaataacagtctgtgaagaaattgaacccatcaagcgccatgatctcttcgtaaagctctttactgatagggatgcttctgtttttcttcccttttgttctgacaaaggtaattcggtatttggtcacctgtgagcgggtaagatttacggcttcacgccagcgtgcgcctgtgcttaagcatatcttaactaccagtgccagaattgggtcctgacgtttgcaatcagccagcaattcaacaatctgctcatgggtaagccatgccatctctttttctgcgatggtgaattttcgcatgttctccagtgggttcggatacgaccattcgcccagacgggatagttcgctaaaaacactacttagatagctttgctccaggttaatggtgaccgggctggctcctttcttccatttctcgctgaagtagatctcacctgtcagtcgtttatctcgataatgggcaaacattttagatgtgagatcggttgcaaggggattgcccagagcgtcaaccatcagcagcaatttgtcatagacatgctgcccagcagtcagagatttaccatgtagtttgaaccatagttcaaccacgtctttcagtgttcgacgatccactgattcacccagccagggctttgcttcggtttcttccatcgtgtgacgctcaaaagccagagcttcgcctttggtggcgaattgtttacgcacacgacgtccactacgtccggcggggtaacattcgcaaagccattttcctgtggtgagttttcgtactgccataaaaaaagccctcatatcagagggctaaatttaactgtatataaaaacagtgtgcgccgggagaccggttagagatcaaggggtgaaagtccccgaccattgaaggaccagcaatccacaaggtccccgagtcatgcgttgcataccgcgaggtatggggcgaagcgttgacaggggtgttgacaggccagccattgagccacgaaatgtatattaaattaccgggtgccgacgttgtactgttaacggaaggcaacatcatagggtgcgatactgcgagtgccacatggacccggcggggtctgagaccctggcatgtcaatacgatctctacgcgggaaccgggagatctcccctctgaccatctgccagtgtcggagatggcccgcaccgggaagacgaggagtcatagccggtgatgtacggagaggagaagtcggactcgctcatagtagcggcgaagcaggcgaacaacccgaaaggagcggagtcagtggagcgaaggagcggggccaaggggaacgcggaacagccacacatgcgccggacacagagccgggaaagcatgtcacagaggctgtcacgcgtgcgggaagctgcgaagcagcggaagaaagaacggtttacagcattgttccacctgctgacagtcgaagcactggaagccgcattcctctccctgagcaggaaagcggccgccggagtggatggcatcaggtggatggactacgccggaaacatgaagaacaacataacagatctgcaccggaggctacatcagggcagctacagggcgcagcccggcaggcgtcactacatcccaaaagcggatggaaaacaacgcccgctcggcatcgcctcgctggaggacaagatcgtccagtatgcgctggtgaaaatcctgaacgcagtctatgaaaacgactttatggggttctcatacgggttcagacccgggcgaagccagcacgatgcactggacgcactggccacagggctggtacgcactaacgtaaactgggtactggatgccgacatcagtcagttcttcgacagggtgagccacgaatggctgatcaggttcacagagcatcggatcggcgaccggagggtaatcaggctcatacgtaagtggctcacagccgggacgtcggaggagggtcaatggcgagcaacggaggaaggcaccccacagggtgcggtcatctcaccgctgctggcaaacatatacctccactacgtcttcgatctgtgggcgcatcagtggcgacgtcgctatgccacaggcaatgtggtaatggtcagatacgccgatgacatcgtcatcgggttcgacaaacgatacgatgcccggcgcttccgtatagccatgcagcgcagactgagggagttcggactcacggttcacccggagaaaacccgtctgatggagttcggccgcttcgctgccgaaaaccgtgccatcaggggaaaaggcaaaccagaaacgttcaacttcctcgggttcacgcacatcagcgggaaagatcgcaacggcaggttcatgctgatacgaaagacccgccgggatcggatgacggcaactctgaaagccatcaaagacggtctgcgaaggcgctggcattactcaatccccgaacagggaaaatggctcaggagagtggttcagggatacctgaactatcactcggtaccgggcaacttccccaccatgcagaagttcaggacacacgtaacaaacctctggcgccgggcgctcaggcgcaggagccagaaggatgatacgacctggacgaaagcaaacaaactggcagccgcatggctaccaagggttcgggttcttcatccatggcctgtggagcggttcaccgccagacacccgaggcaggagcccggtgcgtaaatcgcgcacgccgggatctgtgcggggggtatccggtaacgggtatccctaccgcgacattcaatgtattttttacttaggagcatacatgttcatgattaatctgtttctttatcacttccagttactttaactttgtctttgattgtattcaaaaatgacgcaaagctcggtggttgctctgtctgacctgaaaatgcagagtcacctgaaatattccaatccttaaagacttctattgcatcctctttagttgctgtagaaccgtatatctgcaaaaaaacttgaccaaacatcaaagcatgtcgacgatcttttcgcctgatcgattcatgtgtgtacttttttgagttactaaggcagatatatgatagccatgaaagaatggcgattccaactaatcctcgcgtgaagatatatattaactgaaggttagtgagattttttaaatctaagttcatgtataatgtaaaaaaagcagatattaccgcaaggaagccaaaaaataccccagcaatagaccagataatagacatcaatataaaatgtttgtcatcactagcaagatctgatttaacatcgttaacataggtggggattttttcatcgattctttgttgctgtacttggctacggagttccttattttcactaatcaaagaattaacttgttttacgtttttttcgattattgcgttttttctattaagatcctgagtataatgctctaactgtagagttaatatgctgtttcgttcttctaattgtattatatgttctacataattattaggttcaagtgattttacattttttcttttattagtttcattttcatttatattgggttcttcatccatctgtggcctagtcatgtatttttcaattagtgctaggttattatgagcttcagaaaactctcctgcttctattaagttttttatatgagagtagaagtgttttgctatattttcagactgtgaattaagcaagtctaataggtgtttttttatttcgctatctttattggttggttcagtcatgatgtttctctttatacatttttagtaaaaactcttttacattttgccaaaacgataatgtcagtaagtaagcattcaaaacttgcgttagtgcctacaactttaaccataccaacgggtatgcgagtcaaatctttgatgcttattttcccttcaatattcacaagccacttgccatcagtaacttcattaaattttgattctacaatatatatttcctcatcaatgaatactgctaaaggttgcagaaaggttccttctaacaacttagagtcaaaagtcaaaacggtttcttgagcaagagatccatcaattattttatgatatgggatagtgatagtattgattcgaggcttttcaaacattgccccgttaccagtggttagccatgttaatgaagcaccagtttccagtgagcattgaataatccagtcagcaggaaaggtatctctcatgtaacgattggctaatgtactttttgatacaccaatatgatcagctaaagcttgtcttgtcttaaatccataagccaaaacgattcgctctattgctgcttttccgccttggttaatagtaaaaaagttctcattttggatgtcttgttctctattgagatgttgatgcttgctgtcacaattgttgtgacttttttctgcattatttgtaattcttcccttctctgtatcagtgccaaatgccaaccactcgaccggcactccagtctccatgctacagataacgacccaatcagcagggaaagtgtcacgggcatacctgttcgccattgtactttgcgatatacctaggtgattacagaatgcttgtcgggaagaaaaaccataggctttcagtatccgagctataaccgattgccctccgcgattctgcatgattaaggatttctttttttcgtccacatggcgaaatgtgatttcgtgtgttgacataaccgatttgtgatcctattctccgaaatgtgaagttgaagccacgattaaaactgactcaccacaagccaataggagatgttgcatcatgacccctaacatttcaataaccctgaatacgccacatgtcacaattgagcgttatagcgaacttactggtctttcaatcgacacaattaacgatatgctggctgacggtcgcatccctcggcatcgccttcggaaagacaagaaaagagaaaaggtgatgatcaaccttgctgctcttaccgttgatgcacttactgattgcaatgttgtattcaactagttccattttgggatgcatcaggggtgtcgaccatgtttgattaccaagtttccaaacatccacattttgatgaagcctgtcgtgcattcgcattgcgccacaacctggtgcaactggcagaacgtgctggcatgaatgtgcagattctgcggaacaagctgaacccagctcaacctcatttattaaccgcaccagaaatctggctgcttaccgatctgactgaagattcaacgctggtagatggttttctggcacagattcattgtctgccatgtgtaccgattaatgaggtggcaaaagagaaactgccacattacgtcatgagtgcaaccgcagagatcgggcgtgttgcagcaggtgcggtatctggcgatgtaaaaaccagtgcaggtcgtcgtgatgctatcagcagcattaactctgtaacacgactgatggcgctggccgctgtttcattgcaggcccgtttacaggctaatcctgcgatggcgagtgcagttgataccgtgactggcctcggtgcttcattcggtttgctgtgaggtgcttatgctgacgaaagaaccatcatttgcatcgctgctggtaaaacaaagtccggcaatgcactacgggcacggctggatcatgggtgaggatggtaaacgctggcatccgtgccgttcacaagatgaattgctggcagaactatctacgaaaaaacaggggaacaaatggctattgaaggcgctgcggcgactgttccattaagccccggtgaacgcctgaacggacttaatcacattgcggaattaagggcgaaagtatttggcctgaatattgagtcagagcttgagcggtttattaaagatatgcgtgatccacgggatatcaataatgaacaaaataaacgggcactggctgccatattctttatggcaaaaatcccagctgaacgtcatagcatcagcattaatgagctgaccactgacgaaaagcgggagctgattaaagcaatgaatcattttcgtgcagtggtgagcttatttcccagacggctaaccatgccgaattaaccaactaatgaaattcatggcgtaaacccgccgggcatccctttatctaaattcaggagaattgattatgcgtagtattgaaaccctcacgactaaaaccggaccggatgatgcagggcttaatattttactgacagaggctcgtctggaagaccgccgggcaagggctgaagcaatggcagctcgccttgatagcctggcgtgtcatatcacatcccgccagctaaaccacgtcgaagcggcagaactgctgcgtgtgactgctgaagcaatccagaacgaagcgcaggagatccactgatggctgatgcaatggatctcgtacagcagcgcgttgaagaagaacgccagcgtcatatccgtactgcccgcgccaaaacgccgggcgtatcccgcgtgctttgcattgagtgtgaagcaccaattccgccagcacgacgtcgcgccattccgggtgtgcagctttgcattacctgtcaggaaatcgcagagctgaaaggcaaacattacaacggaggtgctgtatgagcaccatcctgaaatgggcgggtaataaaaccgccattatgccagaactgaaaaaataccttcctgctggcccgcgactggttgaacctttcgcgggttcttgtgctgtgatgatagagacggattaccccagctatcttgttgcggatattaatcctgatttaatcaacctctataaaaaggttgctgctgattgcgaggcgtttatatctcgtgccagagctttatttgaggaagcaaacagggaggtggcttattacaacataaggcaggagtttaattactccactgaaattactgatttcatgaaagcggtatatttcctgtatctcaatcgtcatggttaccgtgggttatgtcgctataacaagagcgggcatttcaacattccctatgggaattataaaaatccgtatttccctgaaaaagaaattcgcaaatttgcagaaaaagcccagcgagcaacgtttatctgcgccagctttgatgaaacgctggcgatgttgaaggcgggggatgtggtgtattgcgatccgccttattacggtacgttttccggctatcacactgatggcttcactaaggatgaccagtatcacctggcatccgttcttgaacatcgatcatctgaaggtcatccggtcattgtttctaacagtgacacatccctgattcgttcgctgtatcgcaatttcactcaccactacatcaaggcaaaacgcagcatcggcgtgtcggctggcgagagtaaatctgcaacagaaatcattgctgtttccggggcgcgctgctgggtgggatttgctccttcgcgtggcgtagatagttctgctgtgtacgaggtgcgtgtatgagtcatgacgatatgagcaactctagcggctttaacgaggccgctgcatcattttcatggaacggcccgaaaaaggccattaatccttatctggacccggcggaagttgcgccggagtctgcactttcaaacctgatcactctgtatgctgccgataacgagcaggaacaactgcgccgcgaggcactgagtgagcaggtctgggagcgttatttctttaatgaatcccgtgatcctgtccagcgcgaaatggagcaggataagctcattagccgggtaaagctggcgcatgagcagcagcgttttaatccagacatggtcattctggctgacgtcaacgcccagccttcccatatcagcaagccgctgatgcaacgtattgaatacttcagcagcctgggcaggccaaaggcttattcccgctatttgcgtgagacgattaagccatgtctggaacgactggagcatgtacgcgacagtcagctatccacttcttttcgctttatggcaagccatgaagggctggacggcctgctgatcctgcctgaaatgagtcaggatcaggtgaaacgcctgtctacccttgtcgctgcgcatatgagcatgtgtcttgatgccgcttgtggtgatttgtacgccaccgatgatgttaagccagaagaaatccgcaagacatgggaaaaggtggcagcggaaaccctacgtttggatgtcatcccgcctgcgtttgagcaactccgtcggaaaagaaaccgccgtaaaccagtgccctatgaactcattccgggctcgctggcgcgtatgctgtgcgccgactggtggtatcggaaattgtggaagatgcgttgtgaatggcgggaagagcagttgcgtgctgtctgcctggtcagcaaaaaagcatctccctatgtcagctatgaagctgtgatgcataaacgtgagcagcgccgtaagtcgctggagtttttccgttctcatgaactggtgaacgaagacggcgacacgctggacatggaagatgtggtaaacgccagctgcagcaacccggcgcatcgccgcaatgagatgatggcctgtgttaaaggtctggagcttatcgcggaaatgcgcggtgactgcgccgttttctacaccattacctgtccgtcacgtttccattccacgctcaataacggcagacccaatccgacctggaaaaacgcgacggtaagacaaagcagcgattatctggtcgatatgtttgctgcatttcgtaaggcgatgcacaaagccgggttgcgctggtatggcgtgcgggtggctgagccgcatcacgacggcacagttcactggcacctgttgtgtttcatgcgcaaaaaagaccgccgcgccattactgcattgttgcgtaagtttgctatccgtgaagaccgcgaggagctgggcaataacacggggccgcgctttaagtctgagctgattaacccgcgcaaaggaacgccgacaagctacatagcgaaatacatcagtaagaacattgacgggcgtggtctggctggcgagatcagcaaggaaacgggtaaatctcttcgtgataacgctgaatacgtgaatgcctgggcgtctttgcatcgtgttcagcaattccgcttctttggtattccggggcgtcaggcttaccgtgaactgcgattgctggctggtcaggcggcaaggcagcagggtgacaaaaaagcaggtgtgccggtactggataacccgcgccttgatgccattctggctgctgctgatgctggttgttttgccacctatatcatgaagcagggaggtgtactggttccccgtaaatatcacctcatcagaactgcttatgaaattaacgaagagccgaccgcctatggcgatcacggtattcgtatttatggcatctggtcacccattgcagagggcaagatctgcactcatgcagtgaagtggaaaatggttcgtaaggccgttgacgttcaggaggcggcagccgaccagggcgcttgcgccccttggactcgtggcaataactgtccccttgctgaaaatttgaaccaacaagggaaagacaaatcagctgatggggataccaggacggacattacccgcatggatgacaaggagttgcacgattacctgcacagtatgagcaaaaaagagcgccgggaactggctgcaaggttacgcctggtgaaaccgaaacggcgtaaagactacaaacagcgaattacagaccatcagcgacagcagctcgtctatgaactgaagtccagaggatttgatggcagcgagaaagaggtcgatttactccttcgcggcggcagtattccatcaggagcaggcctgcgtatcttctatcggaaccagcgtttgcaggaagatgataagtggcgaaacctgtattaattacgcgggttaacaattcgtgctcttaataataccaggcatatcaggctgatgaacgtaaaaaaacgttttacatcagtaatattattatatactgtaaatataaacagtggctatacatacagtgttgcttgtggtgtcataggaggaaagatgcaggactattttttggagtctttgaagctccagcgcattgatttttttcttaagcttgtagcggctagtgagtgtagtgatgaagagaaggggctggctttgcagtgggtttctgaactgacagatgaactcatggcaaaaatcagaacccacgaatacaaccgctcaatggatgtcatcagctgaggtgacttttatgcgcattgaaataatgatcgataaagagcagaagattagccagtctaccctggacgcccttgaatccgagctttaccgcaatctgcgccccctgtatcccaaaacggtaatccgtatccgtaaaggtagctctaacggtgtggaactgaccggactgcaactggacgaagaaagaaaacaagtgatgaaaattatgcagaaggtgtgggaagacgacagctggctgcattgattttgtcaatagacgcttgttttttctaatcaaaaagggttacatatgagtgagaggcgatgatcaatcagatatcgccttgttttttgtcaagaaaagaataataggctaaaaatgaaaattaataatgtagcgttaccaatatctcttgctgtaatcctaactggttgcgtaccacatgcttctaaccgaaatatcactgctattgaagtggtgaagcctgctattgggcaaagtgctaccgcctacatgggcgatcccattatcacatctgctactggatttaaaacggacgtattagaacttggtgcggctaatggtgcattgtcttctatcgctgctggtacatattgcagtgaggggaatggaatttatcgcaattatcataaccctcaagctgttgcgttaaaaaatctctatgggcaaatcggtaactatgttgattatgttagttacgatgctgcaaaaaatgagatatcaccgccaaatggcacttcttatactgcatcagaaatttctatcaaacgtgttcctgatgggctgtgtcgagtgagtaactcattggttaagactatcgaatacaatggaaatgcaggcggtgtaatgaagttcacctatcgtgaatttgcaaacgatatggctcgtgcagcatttacaacagatttttctgtagattctaaaggaagtgatgttatcgcttacaaaggtgccaagttcaaagtgaacaaggctgataactcgtctatttcttataccattatttctggctttgacaaggctgtcacgttctaggtttcacgcttactgagtatgttacgattttgcacattctgcataaacgcgcatgtctatgctgcatgagatcgcatgatcgtttgaggatcttttgtgttaaggcccgccagttctagcgggcttttgcgtagatcatgcaggtgcatgaaaaccactacataaagtgggcaggcgtggcggggatacgagcgcgcgctggagggataaatggaattgaaaatgtaccttcttagagataaccttcgctaaaactttattactaaggagtgataatgagtacctggaaccaagcctattctgcaagagaagatttgaaatcgtatggtgataatggactggctttgtttgcgttagcattacatttcagaattgatgatattgatagtgtcgcagcagagtccattaccgatggacatgacgataagaaatgtgaccttgtgtatattaatgaagaagaagaatttgctgtacttgctcaatgctatttctcaagcaaagatagacaggaagctccagcaaataaagcgagtgatcttaatattgctttagcatggcttctgcaaagagatttgcatgatgtacccgatagaataaaatcttctgctcaacagatacggacatcaatcaaacaagggaaaattaaaactctgtacgtttggtatgttcataacttaccatcttcaacaaatgtggctcaagagctaattacggttcagcagacagcagcaactattttaaaacatgattttgaagatgctaaaatacaagtgcatgcaatggaagtaggcactgaaaagttgacggaatggtatagtgaatcactatcaccaatactggttgatgagattttcaatattaaagtcagtgatggtggctatgaaataaaaggagataattggaatgcattctgtactaccattcagggaagagatttagctagagcgtacaaaaagcataaattaaaaatattttcagcaaatgttagagactaccttggatcaaggtcatctgattcaaatatcaataatggtatccgtaacagtgcggaaaattcagcatcagaattttgggcatacaataatggcgtaactgttttggttcatgaatataaattcaatgaagcatcaaagaatcttgaaatcagagggatgtcaatagttaatggagcacagacaacaggtgctttaggaacgctgccacgattacctccagaatcagttaaagtccaagctagatttataaaagtcaaagatgcggatgctgatctaattcagaatataattcagtataataacagtcagaataaagttgaagcatctgatttcagaagcacagacaaaattcaaaaacgacttaaaaatgaatttgcttctattcctgatgctgaatatgatggaggaagacgaggaggtgctgaaagtgtcattcgtcgaaaaactaatctactgccttcttatactgttggtcaagctttgatgagtttccatggagagccgacgatagcttataatcagcgatctgcaatttggactaatgactctcattattctaagatttttaatgacagtacaaaagcttcacatattgtttgtgcgtattctctcatgcggtgtattgagaacaagaaaatagctttggcaaagaaagatactctttcaaaaaatgatagcgctcaattgggatatctcaggcatcgtggttcaatacctttattgtgctcggctattgccgaatgtttggaaaactttttgggccgtcccgttcctaatttatttagagtttcgtttggaagtacggtctctccttctcaggctgaaagtatttgggagccaattgtagatgtgtgtctggctttaagtaatcagttgctgcctgcactggttgaaggagggttgaaaagtcctacaaaagttaaagattgtatatcaaatttttcacagcttattactgcaacggcccaaatgaaccagcctgtatatgaggcatttgagaaaaaaatcaaatccgcattctaactaaaagaaggccttgtaagaggccttcttgatattttactgatcagcgaacatattgtcgtcataatgagtatgtcgcaaaacgaataatttcatctttcaaccatctatttagttcctgtagccgtttctgtagcggcattaattcgttacgaacaaaaacgcaactggctttctctacatccccaaaccctccaacattattaggcataatccccatcatttgcggcggcacgcggtgcgcagccatcatgtcgtcgcggctgacatttttgatattcagaaattcatccttcgccgcgacttctgataacgggatgatttgaagcccgtcttttttaccgttaggcgagtacataaacaggttacggaagttaccaggacctttggcacttttcatcgcgttgcggagattgttcacatcctcctgattctgcgcggcatcggtcatatacatgatgaagcctgcatggctgccgttgatgtaatacttgcggcggaacagcgtggcggactcgttgagcaaagcggatgggatggcagaaagataaccgggcaggccgtagatctcctggttgatgtccggttccatcagatgaaaaatgctgcctttcgtgaactgatacggctgggttgtcataccatattgcacaaaccagtaagtatccatgtctaatccgcgtcgggtgtattttgccagagcaggctcaagggcgataacttcaccgaagcggttagtgcgtttctccaggtaggcgttaccaaaaaccagatagtcctgcacaaaacgtgaaaaagcctgctggctgagcagcgggtgagggatataggtgctggtcagaatattgcactttactgcaatcggtgagctgtgatgcacggcggcgcggaaggttcgcgccagtccgtcaaaactcactggcggctcataccagcgatctgtctgtacgcattccacatagtccagtagttcgcggcgatccagaactggaatgggatcgccgaagctgaatgcttcggctgaagtctggcttttatgctgggtctggttctgcgacgcagcgcggttcttcttactctttcccatcaaaaaatctccacaatattactggtattggcggactcgccctgcagtggttcgttaaacagtgcgtgcattgttgcccacgccagatcggcgtggctggtttcttcgctgcggctggcttcatacgtcgggcggttgccactggcggtggtggcgcgacggattgccatgaatgactgcgcaatgtcggtgtgcccggcgtcaaactccagacggcggtggctgataatgtcgtaggccttgagtaccagagcgtttttaacgttggggttgtagacaaactcccggacggcaggaaaaaacgctttcacgttctcgtaaaccccgtgaccgacgccggttgagtcgataccgatgtatgtcacgttgtactgttcagtcagttttttgatggcgtcagcctgggcgcggaagtccatcccgcgccactggtgacgctcaagaatgcggaacttaccgcccggcacggctggcggtgccaccaccacgcacccggcgctgtcgccgttttgcgtaccttttgccgggtcataaccgatccacacttcgcgccagccaaacgggcgcagggccagtgcatgaaagtcggtccagacttcccagctgtccaccatgcacgcctgcagctcgctgagcggaaacacggacgcgagatcgtccacaaactcgcacatcagcaggttctggtattcgtccgggctgtactccatgcgcaactggtcgagatcgaacaggttacatccgccgcgcacagcatcttccacggtgactatctggcggtattgcccgtctgcgcacagcaggccgggggccagattgctgtgggacaggtcgatgtccaccttatcggctttgttgcgcccacggttgaacagcgcaccggaccagaacggataagcactgtgtgtcaggctggatggtgtggaaaaataggtttgtcgccattttttgtgaatagccataccggaagccactttgcgcagctcctggaatttcggtatccagaaatattcatccagatacaggttgccgtggtaactctgggccgtgcgggcattggtgccgaggaagtaaagcgtagccccgctgggaagcaccatcggatcgcctttcagctccacttccacttctttggcgaagtcgatgatgtactgtttaaagacgtgggcctgtgccttactggcggaaaggaaaatctggttacgtccggtaagcagggcgtcaatcagggcttcacgggcaaagtaaaaggtcgcgccgacctggcgtgacttcagcaggttgcggatgcggttggtttttccggcttcccaccagtggcgctggtagttgaacatggaggaatggaagatttcttccagcttctcaatctgttcatcggtgaaaacgttcttttccggctgacgacgcgggcctttgttgcggttggcgacgttagggtttaagtcggcttcgttgccgccattgttaaacttgccgatccgcgcgtggcgctccgactggcgcgccagcaggtcaatctctttgaaatctttcccttctttgtgctccttcatgatgagctggcagtagcgtgcggcggtggtgagctgcatctgatccagcggcccatagtcaccccacttgtcgcgtttcttccagctgtgaacggttgcaactttctcgcccagcatttcagcaatgcgggctacgcgatatccctgaaagtacagcagcatggcctgccgacggggatcgagatctgcggatgtcagtgtggtgttcatggcacaaacctacagccttgaatgaaggctttccccgcctgcggtttgtgtggttgtcggtacaaataccgtgcattgtttcactgccctcatcaccgcaaccataaggctccagtaagttttttctaacggagcacggctcatgacagtgaaagcaaagcgttttcgcatcggggtggaaggtgccaccaccgacggacgcgaaatccagcgtgaatggctggaacagatggcagccagctacaacccggcagtgtataccgcgctgattaaccttgagcacatcaagtcttatctgccggacagcacctttaaccgctacggcaaggtaacggcgctgtttgctgaagaaatcacggaaggtccgctggcaggcaagatggcgctgtatgccgacgttgagccaacggagtccctggtggagctggtgaaaaaaggccagaaattattcacttctatggaagtcagcccgaagttcgctgatacgggcaaagcctacctggttggcctggctgccactgatgatccagccagtctgggtacggaaatgctgacattcagcgccagtgcagcccataacccgctggcaaaccgcaagcagaatcccgccaatctctttaccgccgcagaggaaacggtgatcgaactggaagaaatccaggaggacaagccgtccctgtttgcccgcgtcacggcgctgttcaccaaaaaagagcagtccgacgatgcccggttctctgatgtgcataaggccgtggagctggtcgccactgagcagcaaaacctgagcgcacgcaccgaaaaatccctgtctgagcaggaagaacgcctgtctgagctggagacagccctgcaggcacaacaggccgcctttaacgaactggtggacaagctgagccatgaggactgccgccaggactaccgccagcgtgcaacaggcggtaacgcccccgctgacactctgaccaattgctgatggagcataaaacccgatgaagaagaatacccgctttgcttttaacgcttacctgcagcagctggcgcgtctgaacggtgtggcagctgaagaactgtccagcaagttcaccgtggagccgtctgtacagcagacgctggaagaccagatccagcagtccgccgctttcctgacgctgattaacgtcacgccagtgactgagcagtccggtcagctgctggggctgggggttggcagcaccattgccggaaccactgacaccaccgcgaaagagcgtgaacctgtcgatccgacgctgatggtcgatgtggaatacaaatgcgaacagaccaactttgacacggtgctgacctacgcgaagctggacctgtgggcgaagtttcaggatttccaggtgcgtatccgtaacgccatcgtgaaacgtcaggcactggaccgcatcatgatcggctttaacggcgtgaagcgtgcgaaaacctccaaccgtagcgaaaacccgctgctgcaggatgtgaacaaaggctggctgcagaaaatccgtgaggatgcaccggagcacgtcatgggcagcaccaccacgggcggtgaaaccacaccgggtgcggtgaaagtcggtaaaggtggcgaatatgccaacctggacgccgtggtgatggatgccgttaatgagcttatcgacgtggtctaccaggacgatgacgatctggtggtgatttgcggtcgtgaactgctgtctgacaagtatttcccgctggtcaacaaagagcaggaaaacagtgaaaaactggcagccgatatgattatcagtcagaaacgcatgggcggtctgcaggccgtgcgtgcgccgttcttcccgccgaatgcgctgctgatcacccgtctggataacctgtccatctactggcaggaagacacccgccgccgttcagttatcgacaacccgaaacgtgaccggattgaaaactttgaatctgttaacgaagcctatgtggttgaggactaccgctgcgccgcactggtggaaaacatccagattggcgatttcagcgccgccgcagcagaagccggagcgtaacctatgagcctgagtcccgcacggcagcatcgcctgcgcgttcaggctgaacaggccgcccgtgaaggcggcagtgttcgccacgcgtcgggctatgacctgatgctgctgcaactggcggaagaccgccgccgtctcaagggcgttcagtccacggtgaaaaaagcggaaataaaggtggagctgctgccgaaatatgccgcctgggcggagggcgtcctggctgccggaggcgctcaacaggatgacgtgctgatgtacgtgatgctgtggcgcattgatgccggagattatgccggggcgctggagatcgggcgtcatgccctgcgtcatggctgggtgatgccgctgggtaaccgcaacgtgcagaccgtgctggcagaggaaatggcagatgcagcccagagcgcaatgcttgccgccaccggctttgatgccgatctgttgctgcagacgctggagctgacagacggtctggatatgccggaccagtcacgggcgcgtctgcataaagcgattggcgctgtcctgagtgaaagcaatccggcttccgcccttaatcatcttaaccatgcgttacagctcgatccccgctgtggcgtgaaaaaagacaaacagcagctggagcgcagactgcgcaatgacagccgctgacagaacgtgcccccgcgcacgggcggcacggggtggcgaaaggcaccgccacatcaaaaccccgtccaccgccctctatttcaggagaaagcagcatgaagtttgttgcgccagaacaggcaccggaacaggcggaaatcatcagaaatacgccgttctggcctgatgtggacctgtcggagtttcgcagcgtgatgcgcactgacggcacggtgacgcagccgcgtttaaagcaggttgcgctgtcggcaatttcggaggtcaacgcagagctgtatgagtttcgcagacgccagcagatgctggggtatgcctcgctggcagaggttccggcagaacagctggacgggaaaagtgagcgcattcagcactatttcaacgcggtttactgctgggcacgcgccatgctcaacgaacgataccaggactatgacgccacggcatccggtgtgaagcgcggcgaagaactggcagaagccagcggtgatttgtggcgtgacgcccgctgggccgtcagccgggtgcaggatgcgccgcactgcacagtggagctgatctgatgaaagtgcgtgcgtaccagggtgacacggtggacgcgctttgctggcgtcattacggacgcacgcagggcgtcacggagcaggtactgcaggcaaatccggggctggctgagcacggcccgttcttaccacacgggctgcaggtggatctgccggatattgccaccacctccacggtgcagaccgtccagttatgggactgaaatatgacgcttgaacggatcagcgccttcatcacgtactgcatcgctgtactgctggcatggatgggagatttatcgcttaaggatgtgtcgacagtgggcggtgtgttgattggcgtgctgatgctggccatcaactggtactacaaacacaaaacctaccagctgctgcgcggcggaaaaattacacggggggaatatgaatccttcaaccgttaaacgctgcctggtaggggcggtgctggcgattgccgccaccctgccgggctttcagcaacttcatacctcaatggaagggttgaagctgatagccgattacgagggctgccgcctgcagccgtatcagtgtgatgcgggggtgtggaccgatggcattggcaatacgtccggcgtggtgccggggaagaccatcacggaacggcaggccgccgggagtttcatcaccaacgttttaagggtggagaaggcgctggatcgctgtgtcctggtgagcgtaccgcagaacgtctatgacgcgctggtatcgctggccttcaacgtgggaaccggcaatgcctgcggttcaaccatggtgaagtttatcaatcagaagcgctggcgcgaggcctgctatcagttgccacgctgggtatacgtcaaaggcgtatttaatccgggactggacaaccgccgcgcgcgggagctgtcctggtgcttaaaaggagcgtaacgaaatgaaaaagaaactgatcggtgggttattttcggtgctgtacacggctctgatgatttttagtctctttgttccaaacaatattgttccggcactggttacagccttgacctggatagcctgcctgctgagctggggagcggtgctactatgcctggctggatggtatgcgggcggcactcatcggcgggaggcaaagcaggcgctgacgcgctttttcagcacgccaggaaaccaggtgatccgatgggccaggtgttcactacttgtgatttttctcccctttacgggccacgttgtcaccctggtattttatctgctgacgctggccgcgcttaaggttctgcgtgcgcagattattgatgcggagccggtgacggtatgacgaaggcgctggcggtaattctggcgctggtagtgctggcgcttggctggcagtcatggcggatgaaggaggccagccagaccatcgagcggcaagggcgggatctgaaaacgacaggcgaaaaactggcaaagacgaacagccagctgatcgccctgtccatcttgtccgaaaccaataaccgggaacaggcaaggctttacgcggtggcagaaagtacaaacgcgctgctgcgaagccgtcagcgcagaattgaggagttaaaacgtgaaaatgaggatttacgccgctgggctgacactcttctgcctgctgacgttatcaggatgcgcgaacgtccagccctcgccggaggtgctgcttaccgtgaatggttgtcccagagtgacgcagtgccgcctggaaaagtcggtggcacgcactaacggcgatctgctgaccgcgctggatgaagcggaggcggcctgggcggtctgcgccgataaagtggacacgataatttcctgtcaggagcgaaacagtgaacaagcctcaatccttacgccgcgccctgaataacgcggtgccatatgtccgtgataacccggataagctgcatttgttcgttgataacggatcggtggtggcaaccggggcagcgtcactttcatgggaatatcgttacaccctgaatgtggtgattgtggatttcagcggcgatcaggggttattgatggcgccggtggtggcctggctcatggagaatcagccggatgccattcataacccggagctgcgggaaaagttgctttcctttgaagtcgatattttgcgcaatgatatctgtgatatcagcctgaacctgcaactgacagagcgtgtgatagtcagcgctgacggtgacgtgtccagcgtcgaagcagtgccggaaccggacgaaccggacgaaatgtgggcggtgagccgtggctgatctgcaggaagttgacgcctggttagatgcgctcttggcgggtctggagcctgccgcacgtaagcgcatgatgcgggagctggcgcagcagctgcgcctcaaccagcagaaaaatatcaggatgcagcgcaacccggacgggacggcttacgagccgcgtcgcgtgacggccagaacgaaacagggccgcatccgtcggcagatgtttgcaaaactccgcacaacaaaatacctgaaagccgtcgccagccaggactcggcaagcgtcgagtttgagagccgtgtgcagcgcatagcccgtgtgcatcactatggcttgcgtgatcgggtcagccgtaaaggccctgtgattacttatccgcatcgacgattactaggagctaatcatcatgtcattgagttaattcacaatagtttatatagatggttgtttaattaattttcatttttaaatttactttttgtttgtgctgctatagcctctgttagccctgcaattaatttttcttgtggaggatgcggggttttatcaaagctgatattgtgattccttaaggcatctagagtagacgagaattttgatatatctccccgagatagcatatatgctatcttttggttctcataatcattgctaagttgcatgtaatatttggtaaaaataacaaatatgcgtgttacatatcctataaataaaagaacggaaaagctaattaatatagaggctattgaatcggctattttttctgacttgtcttttttgaggtaaattaaatcatcaggttgtaacttgaatctatcatttctagcggtgttggcatcgctaacgctattatttttgtcatgtaggttttgtgtttttgtattgaaaaaggcctctaaggcttttgtgtagttatttagaatagtggttgcttgatatagttcattatttccatcaatcatgcttgatatgaaatttgttattgggttgttgttttttgatttgattgcgaagattccggttaatactagggcagtggccaacaaaagaatgtatataaaagtgattgttattcttcttgtgctaatacttcttgtgtttaactcttttaaagtttctaaataaattttttgttcttcgtccatatctttctctcttgctgtaccagaagtattgtactgttgttcatacaatctacctgaactatctaaaaagtcgacaaacagtcatcctgattggatgaatactcaactaaccgaaatcatgcgccttatcactaatctgatccgcaccggcattgtgaccgaagtggaccgggacagctggctgtgccgggtgaaaacgggcgacctcgaaaccaactggattaactggctgacctaccgtgcaggtaaatcccgcacctggtggtgcccgtctccaggggagcaggtggtgctgttcagcctgggcggcaatctggagacagcctttgcgcttccggccatctactccaacgcctgcccgccgccgtcagactctgaaagtgcggacgtgaccgcatacgaggatggcggctggttcgaatacgaccccgccaccgggcgctggattattcgcggcgtgaaaagcgtgctgattgagtcttcgcaggttgtctcctgcaaaaccggtgagtttgtgatcgaggctgacaccacccgtattaacagcaatgtgatcctgaatggcgatgtgacccacggcggcggcgcgatgacgtcaaacggcgtcgttgctgataagcataaacaccctggcgacagtggcggaacgacaggagacccattttgacgctctatatcgggatgagccgcgataccggcagagctattacggaatctgaccacctgcgtcagtcggtgcgtgacattttgctgaccccgcaagggagccggcttgcgcgccgggagtatggttccctgctttcagcgctcattgaccagccgcaaaacccggcgctgcgcctgcaaatcatggctgcggtgtatgtggcgctgcggcgctgggagccgcggctgcaactggacaccatcacggttaacagcagcaacatggatggcgcaatggttattgagctggcaggccagcgtaatgacggcgtgcccgtgtccctttccgtatcgacaggagcaggcaatggccgttattgacctttcccagctgccgccgccgcaaattgtggatgtgccggattttgaaaccctgctgactgagcgcaaggctgaatttgtcgcgttatttccggcagaagaacaggaggccgtggcccgcaccttaacgcttgagtctgagccggtggtgaaaatgctgcaggaaaatgtgtaccgggagttgctgctgcgccagaggattaacgaggcagcgagagccgtgatggtggcctattccggcggggatgacctggacaatttaggcgcaaataacaacgtacagcgccgggtgattacagctgcagatgacaccacaacaccacccacggaggcggtaatggaatctgacgcggattatcgccagcgcattcctgctgcatttgaggggatgagcgttgccggaccagtcggagcctatgaatatcacgcgcttagctcggatggtcgggtggcggatgcgtcagcgttcagcccgtcaccggcagaagtcgtggtgactattctggcccgcgacggcgatggtactgcgcctgaagacttactgcaggtcgtcggtgaggccctgaatgatgaggctgtgcggccagtggcggatcgggtgagcgtccgatctgctgagattgtcccctatgaaattgatgcggttctttatgtctaccccggcccggctaaggaacccatcctggcggcagcgaaagcgcagggcacggcatacatcaacgagcagcgtcgcctggggcgtgatgtgcggttgtccgcgatctatgccgcgctgcatgttcagggtgtccagcgcgtcgaactgataaagccactgacggacatggtgctagataaaacgcaggcgtcatattgcaccgattttaaagcagaaattggtggctctgatgactagcagcctgttgccgccggggtcgtctgcgctggagcgcaggctggcgcaagcctgttcaggtatcagtgatttaaacgtgccgctgcgtgacctgtggaacccgtggaaatgcccggcaaagtttctgccgtacctggcctgggctttctccgttgatcgatgggaggaaacctggacagaaaccgctaagcggcaggcagtaagtgatgcgttctggatccatcagcgaaaaggaacggtggcggcagttaagcgggtgatcgaggggctggggtattcgatgaccattgaggaatggtgggaggtggccgaccccgccgggacgtttcggcttgagatcgatctgaatgaaatcggcatcactgagccgatgatttatgagcttgagaggattataggtgatgccaaaccggcgagcagacacatctctcagatgacattgtctactacctctcgcggtattgcgcatcttggtgctgccgcaattattggcgacgaagtaagtgtttatccgcagcaatataagccgggcaacgatattttttacgatggcctgattttccatgacggcaattatcagtatgaggaatgatatggcgagcataaaagaattgccgcgctgggaagatgaggtctatcagatcgcgcgtggtgataaagtagaaggtggtgtcggtggtatagcgaatatgcaggcgaagacgctggcagaacgtacccggtatctaaaaaacgttgttgaatctattccggattaccgcgaattcacattttataaaactgaaaatgatccggaaggaaagttagctggaatcgctgaaacccatgacggccagctatttcgtgttgctcaggggatcgatagcgaaaactcttttatctattatcggaatgatgatggtgatgctgttccggttgcatggcagcctggcacagagttagtcaaaatattgagcaacctgattagtgatcagggagataacccattttctgtcgttttcgataatgggctttctccgttgggctataaaaatggacgcttatacgctgatgaatttgaaaagctatactcctcagattccgggttagagtttggtggcagcataattgataataatcctccagaaggttggagatttgttatttactaccgcaacgggttagtgatgtgtggtcaaaaagatgacggcacaatgatcggttttggtgaggggggagcggtggcggttctattgaaccaggtgatacagctcctgactatgattcaattcgaatgtattcaggtacagcgacagtgcgtgacgtagttgggaaacgcgctggcggtcgttttgttgttaatccggatgacaccacatcggaggagatccccggagggatactggtcgatgtgctggggcgtcgatggtatcgacaggctgattttgtttcctatgatatgtttcttgcgccgcgaatacccgcagcgactctgttgtccgtacaggttgcactggcaatggggaacaggtcatcagcaatagcatacctcgcaggagtggaggcagcagataaagctatccaggcggctcaccgctttgcgaacatcatgaaaatccccgtacgtcagaatgacggtgcattcctgatgttggttgatcatgaagcagaagtacgaacaaataccgacctgtcaggggcgataattcttacctctgcaaattccggtgtgaacgagatacgctggggacctttacgactgcttgacccttcagcacctgaaccgatgcgcatgttcaacataaaaggtaaaccgcgtattgaactgacagctgaagagttagcgacatttaacgcaacgtattcaaagtatctgaaaaaaggctctcagtacctgccttatccgaaactgtacgcgtattacggtgggatgttctatgcgctgtcgcatgaagtggaaatttaccgcaatggagaaaggaataagccgcgtgaccgcgtgttataccgagagttttcacgtattggaaaaaatggcgcattgaccgagaggattgtgaaagacattccagacgggacgattggatatgccgccattatacagaaagaagatgattttctggaatttaaatgcccgcattttattgaactgggcgacagtcgtcgattcctgaatatcgaagtctccaggccgatggtgcgcattaaaaatctggtgcatacgtcatggcagactaacgcaacaagcctcgaaagccgcgtggttatttctgcgcgagaggtttttgacgtattttgcgaatacggagaaaccacttgtcacccggccgagaacggttcatatgtcatttgcattcgtgatacctgtaacgtgcatatcgataactattacggactgcatggctgggggttacaggggcatcacggaataaagggtttatacggcaacagaaatacgtttaaccgcgttgatttccacagcttcgggtacgatgttttcttcaaagatctgactgtgaaaggcaggcaaatcaacctgcagggaggtaatgagtggtcgatagagaaacttcggctgtatatcacccgtaccagtggcgatgcagtggagtatttccttaactacgccatcggcatgaggcaggactatgccagtgactgtgatggcattctcaatattgatggtgtcacggtgatgtgggacagagggctacccgcatggtacaacacgacccggtcatttgaccttgtcagaattatcgatacagccaactctcttgatcaggggattgacagcaaattaccccccgttatcagaattcgcaatgtcgtgtttgaccttgccggcatccagaccggaagaccgaatgacaattttgagttctgcgctgttacggccttacgttctcagtttaccgactactcggtaaccggacgtaaaacgctgctacccgacaatatcaccgttgacggaatgacagctattaacgttcagcccacgcagaacgcggtgatgtgcggcatcaaattgcctgccgacctctatcagaacactgtgggctcacgcaacaaaaagggcagcgacgggacgaacgcccgcataacgctgcgcaacctgcacagcgttatcaacaatccgtctatcgagctggctgcagcccagaccgtcgatattccgggaaacgcggcaacctggaccgctgattacctgaacagtgattacagctggataccgcggattatcctggaaaattgtatcccggcaattatccatgctcctggcgcaaaagctgttgtcgatattcatggcggcaagctggcgcgggtctacaccaacggcaatagcaaccgctgccgggtcactggtgctgatattgagctgatacctgatgcggcgggtgtgacctatttcgcagcagataaaacgctggtgacgggctgttcatggctgaacccggccagtggtgcaacctatccaggtacgttacgtggttcaggaaacgaaatgatcggagaaagtgctaaagcaccaaaccttcctgcaaaagcttttattgaggaataataaatgggaaacggaacgcgtattttacttaactcggacggtgttattactaactgggaaaagcaatattttgaaccagtaaagtcaccactggcagcaattgcaaacccgatcgtggcttttgatttactgactcctgtagataactcacgacatggtttcagcgtgcagcaaggtgtgcagatcctgaaagggtatggacttgaatttcctggttccgccggtagccagactacgtttgcaaagtccggactgtccggactgtcttttcttactgcatttcggttaagcgcagttgatgtatttcagtacgtgcttgactgcagggatctgacaccaggtacaggccatggttacgccattacgtttaaccctgccggtcagcggcttgagcttcgtgtcggctggcctgacggtagtcagggtatctattttcaggaaggtaagacgattgttgcggggcaatggtatgtggcatgcggtgtcatttctcctaaccgcaatcacaaattaacgttgtcagatgggactgcaattgctgcaagccctgcgggttatctgttaaacgtggcgggaaacaagctaatgctgggtgccagtgctgccggttcatcaatgatgaaaggtgatctggctttctttggtgcatgggaaaaagaatttaccgcaggcgacactctgacggctgtcgcgctgggtaaaaacatcatggctttaagagggcaggcagtatgacaaccgtagaagtacgcattgaaacagttaatggcagcatggtcactttttcgcgtgtatctgaaaactgggtaaatctgaaccagtacgaacgggatgacattatcagcggatggataaatgaggataaaaacagccaggccgcattatcggctagtgatggatataccctgagctatcacgttttagctcaagaatagccgaggcgccagacagaaaaggataagagatgagcacagccttttatacaaaactgaccgcggcgggagttaatgccatgactcgcgcagtcatgaataatgaaccaatctctattactgaaatggctgttggagatggtggcggtaataatattaatcctgacggaatgcagggactagttaatgaagtttaccgcgctccgttaaacaggctggttattgctgatctggacagaaatgtcatccgggcagaaatgctgatgatgccccaggttggcggatggtggctgcgtgaagcggcgttatttgatgacagagggatctgtctggccgtagcaagtttacctccatcctataagccattgctggaacaaggggcagggcgtatgagcacggtgaatatttacatcaccgtcaacaatattgccgatgtgcaactaattactgacccggcgatcattctggcaacgataactgaggttgataaggctaagggtgaggcaaaggattacgccgacgaaattgtaggtaacttagacaagaatattcagcaggtgattgctgatgctataacggcggcaaagcgagatttctgggaagatgataatccggttggcaccacccgcttttttaaccagaacctcaatcccaatgagcgctggccgtggtcgcaatgggtgtacaccggcgaaaacaaaacgatccgcgtcggcagggctgacggttcggacgtcgggcagacaggcggcagcgatactgtcacactccagcaggctaacctgcccgctgtgcaggttaacgtcagtggcgaaaccagtgaactccccgggcaggagctgaccaccagggaggcgggacggcataaacacaaaggcggaatgctcgcccctggcgaggcctgggatgataattacatagtcggttcggataacgacagccgccgcaccagaaattatacggatgaggtggccgatcatagccatattgtggacttgccagcccacaaacacacgaccaccggcaaaaccgataacctcggtgaagggaaatcattcagcgtggttgaagcccacacactgctgatgtgctggagccgcgttgcctgataaatcccggtatcagtctgccccgataaggggcttttttctgtctgcggttgtgccattgacggtacaacggccatcaacggcttgcggtgcatgatttccctaccatgggtgaacccctaaacaggagattcattcatggcgcaagactatcaccatggcgtgcgtgttgttgaagttaacgacggcacccgctctatcacgacggtgagcacggcgattgtgggcatggtatgcaccggcgatgatgccgatgcctcagtgttcccgctcaataagccggttctgcttaccgatgtactgaccgccagcggtaaagcgggcgagtccggcacgctggcccgctcactggatgccatcgcagaccaggcaaaacccgtcaccgttgtggtgcgtgttgcccagggcgaaaccgaagcggaaaccacctccaatattatcggcggcgtaaccgctgacggtaagaaaacgggcatcaaagcgctgctttcggcgcagtcgcagctgggtttaaagccgcgcattcttggtgtgccgggccatgacacgcaggctgtttccactgaactgttaagcgtggcgcagagcctgcgcggctttgcgtacctgtctgcctacggttgtaaaaccgtggaagaagcgattgcctaccgcgaaaatttcagtcagcgagaagggatgctgatctggcctgatttcatcaactttgacacggtgctgcaggcggatgcgactgcttacgccactgcccgcgcgctgggtctgcgtgcaaaaatcgacgagcagaccggctggcacaaaaccctttctaacgtgggcgtcaacggcgtaaccggcttgtctgcggatgtgttctgggatctgcaggacccggcaaccgatgccggactgctgaaccagaacgacgtcaccaccttgatccgcaaggatggtttccgcttctggggttcccgctgcctgagcgatgacccgttattccagtttgaaaactacacccgtaccgcgcaggtgctggcagacaccatggcggaggcgcatatgtgggcggtggacatgccgcttaacccttcgctggctcgcgacattatcgaaggtatccgcgccaaaatgcgcagcctggtaaatcagggctacctcattggcggtgattgctggattgatgacagtgtgaatgacaaagacacgctgaaagccgggaaactctggatcgactacgactatacgccagtgcctccactggaaaacctgatgctgcgccagcgcatcactgaccgttacctggtggatttcaccacccgcgtaagcgcataagggggacccatggccttaccacgcaagttaaaacacctgaatatttttaatgccggtaacaactggatgggcattgctgaatccgtcaccctgccgaaattcacccgcaagctggaaaactaccgcggcggcggtatgcccggttcagtcggtattgatctggggctggatgatggcgcgctggatacggaaatgaccatcggcggcactgaggcgcttctgtttaaacagatgggcaaagccacggtggacggcgtgcagctgcgctttaccgggtctattcagcgtgacgacaccggcgaagttcaggccgttgagctggtcgtccgtgggcgccacaaagaggtggattccggcgagtggaaaaccggcgagagcaattccaccaaggtcagcagcgttaactgttacgcgaagctgaccattaacggtgaagtgctctatgaggtcgatgcgatcaacatgattgaagttgttgatggtgttgacctgatggaagaacaccgtaacgccatcggtctgtaattttttcctggcgcgcgaggtcgcgccagccaacccataacaggaaaagagcatgagtgagaaaacagaagcaacggtgaaactggatagcccgattaagcgtggtgataccacgattacggaaattatgctgcgtaagccgcaatccggcgcgctgcgcggtacgcgactgcaggcggtgatggagatggacgtggcctcaatgatgaccgtgatcccccgcatctccacgccaacgctgaccccgcaggaaatggcggacctcgacccggcagacctggccgcgatgtctgtcgaggtggtcctttttttgttgccgaagtcggcacttgccgatttgccgacagcctgacggtagatgacctggtggcggatatcgccacgatctttcactggccgccgtccgtcactgacgttatgccgctgacggaagtgctggagtggcggcacagagcgataatgcgtagcggggccagcgatgagtgataaaaacctgcgcctgcaggtggttctgaatgcggttgataaactcacccgccctttaaaaaatgcgctggctggctcgaaggagctggcctccggcatccggcagacccgtgatcagcttaaacggcttaacgacgcggggagccagttaaaatcttttgatcaactctcacagagtctgaaccggaccagcaacgagctggaccaggcgcggctgcgtgcgcagatgatgacgcgcgaactggcagcgctcgaatcccccacgaaaaaacagacgcaggcgcttgaggcgcaatggcgcgccgtatcacgcctggaacaaaagcagcagcaggaaacgcggcagatggcggcaaccagggcggagctgtaccgccttggcatctctgcgggcggcggtgcccgtgaaacagcccgcattacccgcgaaactgatcgctataaccagcagctggcagagcaggagcggcgcttgcgggacgtgggcgagcgccagcgcaagctgaatgcgatcagggccaaagctgacaagatgcgcgacgtgcgtaacaacctggcggggaacggtgccgggatgatggccgccggggtgacaacgggcgcgacgctgctggcgcctattcgcgcctactcggaatcagagaacgccgcaaaccagctggcaggctcaatgatggggccgggcggaaaggtggcgcctgagttcatgaaactaaacaaactggcaatagccctgggtgaccggctgcccggcaccacggcagactttcagaacatgatgaccatgttacgtcgtcaggggatgtcagcgcaggttatcctgggcgggctgggtgagtcggcggcttaccttggcgtgcagctgcagatggcgccgacggaggctgcagagtttgccgcaaaattgcaggacgccacgcagaccaccgaaaaagacatgatgagcctgatggatcttatccagcgtggtttttatgcgggcgtagaccccgggaatatgctgcagggtttcgcaaatatcagcagcgctatggacattatcaagcagaagggcctggatgctgcaaaaaccttcagtccgcttctcgtcatggccgatcaggcggggatggctggagagtcagcgggtaatgcctaccgtaaaatttttcaggccacgctggatgcgaaaaatattaagggcataaacgacgggctgaaaggaaagggcatcaagttcgatttctccgacgggaaaggcggatttggtggtctggaaaagatgtacgcgcagttagaaaagcttgaaaaactaaatcctgaaacgaaatttgcaacgatgaaagccctgtttggtaatgataatgaggtgctaaaagcgctgaataccatgatgtcaaaaggcatggcgggctatcgtgaaaccgtcgctaaactggagagccaggcaactctgcgcgagcgcgtcgaggcgtccctgaataccttaggcaacaaatgggaagccgctggcggctcttttactaacgccatggcaagcatcggagaaaccgtcgctccagtgctgaaaaatatagcggactggctgggtaatctggcgtccgcgctggatggttttgtgaagcgtcatccgcaactgacggcggcgctatttaaaattgcggccgtatttgccgtggtagctaccgcagcgggtgtggtgtcactggccctggcatccattttgggtcctatggcggtactgcgggtaagtgctggcattctccagctgatatttgcttctgcgtttggtctggtcacaagagtaattggcggtgcaggccaggcggtcatctggttaggccggttgatgatggctaaccccattctggcgatagttggcctgattgcgatgggagccatctatatctggcagaactgggaaacgctggggccgaagtttaaagcactctgggatgccatcacgtcaggggtgtcagtagcctggactgtgattaagcagaccataagcagcaaatgggatgaaattctgagtgatgttgccgcgctggccgcaaagtttaaagcagtgggcggggcgatcattgacggcatcctgagcggtatcaatgagaagtgggaaacgcttaagagcaagctggcatcggtcaaaagctatctgccggactggatgaccggcggggacaaatcgccaggcgcacctcagcagaaagggccgagcggatttttcgcggggatgtatgacggcggcggctatattccacacgggaaggtgggcattgctggcgagaatggcccggagctgattaacggcccggcctatgtgaccagccgcaggagaacggccgcgctggcgtccgtagtcgccggaatgatggggggagcaatgccagcagaggccgccccgcttcatcccatgagtctgccggcagcttcataccgtcctgtaactgataagctagcaggcagccagcctgtattccagtttgaaacccatgcgcaaattattatccaggctctgcccggtcagagtgcgcaggatattgcgcaggaagttgcacggcagcttgatgcgcgcgagcgacgcatgaaggcgaaggcccgcagcaatttcagtgatcaaggggggtacgattcatgatgatggtcctgggcttatttgtgtttcagctgcgcacggttccctatcagcaactgcagtatcagcggaactggcgccatgtgaccaacaaccgcgttaatcgccgtccgacaacgcaatttttggggccagataacgatcagctgacgctctccggcgtcctcatgccggaagtgaccggcggccggttgtcgttgctggcgctggagctgatggcagagcaggggaaggcgtggcccctgattgaaggcagcggcacgatttacggcatgtatgtgattgagggactgaatcagactaaaacggagtttttccgcgacggtatgccgcgcaggattgagttcaccctgtcgctaaaacgcgtggatgaatccctgtccgatatgttcggtgatctcagtgcgcaactgaataatctgcagggaacggaaacatctgccttaagcgatatcagtaaaacggtgggagggctgctgtcgtgaatttcagctctgaactgcttaacaaaggcaacaaaactccggcattcagcatcagtattgaaggcagggatatcaccactgtgctggacaaccgcctgatggggctgacgctgacggataaccggggatttgaagcggaccagcttgatctggagctggacgacgccgatggaaaaatcgtgctgccgcgccgtggtgcggtcattacgctggcgctgggctggaaggggcagccgcttttcccgaaaggggcattcacggtggacgagattgaacacactggcgcaccggaccgcctgactatccgggcgcgaagtgctgattttcgggaaaccctgaatacccgccgtgaaaaatcgtggcataacaccaccatcggggaagtggtgaaggaaatagccgcgcggcacaagctgaagatggcactgggtaaagagctgtcggataagcccgtggagcatatagaccagactaatgagagtgacggcagttttctgatgcgactggcgcgacagtacggtgccatcgcgtcggtgaaaaatggcaatctgttattcatccggcaggggcagggcaaaagcgccactggtaaaccactgccagtgatcactatcacacgcaaggacggcgacagtcaccgctttaccctggcagatcgcggagcctacacgggcgtaattgccagctggttgcatacccgtgaacctgcgaagaaagaaagcaccacggtgaagcgtaagcgcagaactaagaagcagaagaaagagccggaagcgaagcagggcgattacctggtgggtacggatgaaaatgtgctggtacttaatcgcacttatgccaaccggagcaacgccgaacgagcggcgaaaatgcagtgggaacgcctgcaacgcggcgttgcgtcattctcgctacaactggcggaagggcgggcagatctctacacggaaatgccagtgaaagtcagtggctttaaacagccgatagatgatgcggaatggactattaccaccctgacgcatactgtcagcccggataacggttttacgaccagtctggagcttgaagtgaagattgatgatttcgaaatggaatgattcttcgcaatggagaacttttaagttttcaaaatggaataatgcggtatcattattgtgaatttagcaaaaatggggagaactcgaaaaaatgatgatttgcccactgtgtggaagtgccgcccatactcgcagcagttttcaggtatcttcattgaccaaagagcgttacaaccagtgccagaacattaactgcagccatacttttgttacccatgaaacttttgttcgttcgattgcaacgccaaaagagtcaaatccggttcagccgcatccaatgaaatcaggacaggtggcgctctctctttgacgctgccgccattttgtcgccatcgttaaaaaaagtgcttctaacatcatgattttaaacggtataaatttcaggcaacaaaaaacccatcaaccttgaaccgaagtggcggggttgatgggctccacaaaatggggacatcaaagaaaagcagtggcattacttatgactgatgccctgagaaaaagttctgcctgtgacggcttttttctcaaaaaattattgtagccctggccagatgatcacgatgagcgtcccggcaagggtaagcagcacgttggcgatggcgtaggtgcctgcgtagccgagcgcgggaatgttgctgcgcgcggtatcgctgatgatctccatcgccggggcgcaggtgcgggctcccatcatggcgccgaacagcatcgcccggttcatgcgcagcacgtaggcgccgaacaggaagcagatcaccaccggcaccaggctgacgataagccctgccgccagcatctggccgccgacggcgcccagcccgttattgatcccggccccggcgctgagaccgactccggccataaacaccatcagaccaaactctttcaccatgttcagcgccccctgcgggatatagccgaaggttgggtggttggcgcgcaggaagccaagcatgatgccggcgaacagcaggccggcggcgttgccgatgccgaagctgaaggagctgaactggaaggtgatcatgccgatcatcaggccaacgataaagaaggcgcagaaggccagcagatcggtcacctggctgtgaatggagataaagccgatgcggtcggccacggtttttacgcggcgggcgtcgccgctgacctgcagcacgtcgcctttgttcagtacgacgttatcgtcgataggcatctcgatctggctgcgaataacccggtttaagaagcagccgtggtcggtaagcttgagctgcgccaggcggcggccgacggcgttgtggtttttgaccactatctcttcagtgacgatgcgcatgtcgagcagatcgcggtcgaacacctctttaccgttgcggaagctcgggtcgaggcgggcgtgggcgtccgggtagcccaccagcgcaatatcgtcacccatctgcagcaccgcgtcgccgtccgggttggccagaatgccgttgcgacgaatgcgttcaatatagcagccggtctggcggtaaatacccagttcgcgcagatttttgccatccgcccaggccaccagctccgggccgacgcggtaggcgcggatcaccggcaggtagactttacgtttggaatcggtatcgaggccgcgctcgcgggcgatttgctgggcgctggtctgcagatcctgatgctgcagcttgggcatatagcgggcgccgacgatcaggctcaccagaccaaccagataggtcagggcatagccgaggctcagatggtcaagcgactgcgccagctgatcgctgggcaggccgaaatggcgcagggtgtcgcccgcgcccaccagcaccggggtggaggtcatggcgcctgccagcataccggcggtgagcccgatatcccagccgaacactttacccagcaccatggcgatcagcatcgcgctgccgaccatcaccagcgccagcatcaggtagtttttcccgtcgcggaaaaaaatagaaaaaaagttgggcccggcttctacgccaacgcaaaaaataaacagcataaagccgagattaagggcatcggtgttaatcgcgaaatgctgctggcctaataatagagaaacgactaaaacgccaatggaattaccaagttgtactgagccgagacgcagttttcccaggcatagtcctaatgcaagtacaacgaataataacaggatgtaattcccgtttaacaaatctgcgacgtttatattcacgaaagccaacttctcatttactagtaagttgttgaaggaaatggttatttggtctaaggttgctcaggcgttcgcgttgtcgcgaacctattctggcaccctgttataaccagcaaaaatataccgctagtttaatccttcctggatgcggcggctagtgacaatcgtttttaggctggtaggggagttattggcatggattgccgaaatgctttatctgactgggcgacgtggacgtgagttagaggcaacatcaggaggatacggtgaaatctgagcgtagttgggccggcattatctgtggcttcgttctgttcattgtggtgtgcttatcgttgttgttacatatgaaaggggcatttcgcgccagcggcaacccggagctgggcctgctcttctttttgctgccaggggcggcggcgagctgtctctctcctggacggcgggtgctgcgtcctttgctcggcgcgatactggcggcgccggtctgcatggtgacgatgcggctgttcttcgtgacccaccggacgttctggcaggagatggcgtgggtgttgagcgccgtgttctggtgcgcgcttggggcattgtgctttttgtttatctgcgcctggcttgatacctggcgcagtcattcatcgagcaaataaattgactcaggcaaacaggccgagattctcttttgcccaggcttcaaaatcggtgcagccgccgatgtgtttctggtcgacgaaaatctgcggcacggtttcaaccggtttgccaacggttttttccaggtcagctttgctgatgccttcggcatgaatatccacgtagcggtagttgaaatcatcacgctcgttggtcagtttttctgccagttctttagcgcgaacgcagtaagggcagcctggacgaccaaaaataacggtaaacattgcttctctccttaaacctcagccggatggcgaatggcgcttatgatgcctgcaacgggcggggagggaaagaaggttctgccttttacttcgatggtttacggctatgtttgataaatgtcggactgtcaaaacacgtatactggcccgacggcgcggtggaattggctggcgcgccgcgtttatcaaccggagaggcgtgatgcgaaaatttgccccattgccgaaaagcattctgctggttgagatcctcgggatggggctgttaaccctcgcctggctctcccttaaccagtatgtccagctgcctgcgcccattgccagcccgaccgcggcgctggtgatgctctttgccgggatcgtgctgatgatccccgccgccctcgtcgttatgtggcgggtggcgcagatcgtggccccgcagttaacgcactctcctaagcctgaatccttgtctgacagagaaaaacgaaatgacgccgaccattgagctgctgcgcagccaccgttctatccgccacttcaccgatgcccccgtgagcggacgaacagcgcgcggcgattatcgccagcgcgcaagcggcatctacctcgagttttttacagtgcacctccatcatccgtattactgacccggccctgcgtgaacgtctggtcccgctgaccggcggccagcagcacgtcgcccaggcggcggagttttgggtcttctgcgccgactttaatcgccacctgcagatctgcccacaggcgcagctggggctggcggaacagctgctgatcggcgttgtcgatacggcgctgctggcgcaaaacgcgctgaccgccgccgagtcccttggactagggggcgtctatatcggcgggttgcgcaacagcattgaggccgtcacagagctgctggagctgccgcagcacgtcctgccgctgttcggtctttgccttggctggccggcggataacccggacatcaagccgcggatgccggcggccatgctggtgcatgagaaccgctatcagccgctggataacgcgctgctggcggagtatgacgaacagctggcgcactattatctgtcgcgcggcagcaacgcccgccgcgatacctggagcgaccatatccggcgcactatcgtgaaagagagtcgtccgtttattcttgactatctgcataagcaggggtgggcaacgcgctgattacgtgtacactgctgctccggccaggtgatatccgccgccggccgcaggaaaggtgaaagtgtgttcgatagctgaggcccgccagagcgggtcttttcgcagaggtgcaggatgaaaattgccatattatcccgggatggaacgctttattcatgtcggcgcctgcgcgaagcagcgcaacagcgcggtcatcagatcgagatcctcgatccgctttcctgttatatgaacgtcagcccggtggcctcgtcgatccactacaaagggcgtcagctgccgcactttgatgcggtgatcccgcgcattggctcggcgatcacctactatggcaccgcggccctgcgccagtttgagctcctgggaagctatccgctgaatgagtcggtcgccatcacccgcgctcgcgataagctgcgctcgctgcagctgctggcgcgccagggcatcgatctgccattgaccggcatcgctcactccccggatgacaccagcgatctgatcgccatggtgggcggcgcgccgctggtggtgaagctggtggagggcacccaggggatcggcgtggtgctggcggagacccgccaggcggcggagagcgtgatcgacgcctttcgcggactgaacgctcatattctggtgcaggaatacattgccgaagcgaaagggtgcgatatccgctgcctggtggtcggcaatgaggtggtggcggcgatcgagcggcgggcgaaagagggggatttccgctctaacctgcaccgcggcggcatggccacggtggcgcagattagcgacgaggagcgggccattgccatcaaggcaacgcaaactctcgggctggacgccgccggtgtcgatattttacgcgccgcccgcgggccgctggtgatggaggtgaatgcctcgccggggctggaaggggtggaaaccaccaccggcgtggatgtcgccggcaagatgatcgcctggatcgagcgccaggcgacgccggaattctgtttgaaaataggcggctaaccgccggatgcaagacggccatggtatgcggcgctttttttgcgtaagctatggcgtcgtttttccactgtaagaggtcacaggcactatggattcactggtcgttccaggtctggatacgctacgtcgctggctggacgagatcggcatcagcttttttgagtgcgattcctgtcaggcattgcacctgccgcatatgcagaatttcgacggtatttttgatgccaaaattgacctggtggacaacgtggtgctcttttccgccctggcggaggtgaagccgtctgccctgctggcgctgtcggcggatctctcggccatcaacgccagctcgttaaccgtgaaggcgtttatcgacattcaggacgataatttgcccaagctggtggtttgccagtcgctgtctatcggcccaggggtgaccatggagcagttcgcctggttcttccgccaaagcgaagagcagatctcgatggtaatcctcgaagccggcgcaaatcagctgctgtacaaaggcgaagaagaagagcctgcggcggaaaacgtgcaataccattttcttcactaaacctgcctaaaattagcgcagccactaccgcagcggctgcgtattacccgcttttattctgcatttaacctttctttaaagcattattcaccgccattcaggccgttttggcttatcacgtagaccgttattgcataaaaatttgataaaaggcgtttttttacctgggctatagcctcttattctggctacagttattctggcgatgcttccagttgcgagcaaccactccgggagagatccgctctccttttctcaggcaatgaaaaaatatgcatgatttttgcatgcgtagaaatgcgtatatttgagcccgtaagttaacgggcgttgagaaggaaaagagatatgaccgcctttggtaaaaaatggttaacaggtctggttacgggtgcgctgatggccgtctctgccggttcgctcgccgccgaacaaaaaaccctgcatgtttataactggtctgattatatcgcgccggacacggtagcgaatttcgaaaaagagaccgggattaaagtggtgtatgacgtttttgattccaacgaagtgctggaaggcaaattaatggcgggtagcaccggtttcgacctggtggtgccgtcggcaagcttcctcgaacgccagctggcggcgggcgtgttccagccgctggataaaagtaagctgcccaactggaagaaccttgaccccgaagtgctgaagctggtcgccaagcatgacccggagaataaatacgccatgccttacctgtgggcgacgacgggcattggctacaacgtggataaggtgaaagccgttctcggcaaagatgcgccggtggacagctgggatctggtgctgaagccggagaacctcgaaaaactgaaaagctgcggcgtctccttcctcgacgcgccggaagagatttttgccaccgtgctgaactacctcggcaaagatccgaacagcagcaaagcggatgattacaccggcccggcgaccgatctgctgctgaagctgcggccgaacattcgctacttccactcttcgcaatatattaacgaccttgccaatggcgacatctgcgtggcgatcggctgggcaggggacgtctggcaggcggccaaccgcgcgaaagaggcgaagaacggcgtcaatgtctcctactttattccgaaggaaggcgcgctggcgttctttgacgtctttgccatgccggccgacgcgaagaataaagatgaagcctatcagttccttaactatctgatgcgtccggacgtcatcgccaaaatcagcgaccaggtgttctacgccaacggcaacaaggcttccacaccgctggtcagcgagactatccgtaacaacccggcgatttatccgccagcggatgtgttcgccaaactgttcacgctgaaggtgcaggatccgaagattgaccgcgtgcgcacccgcgcgtggaccaaagtgaagagcggcaaataattcctgacggcccgtcgaacacgggccaaatcagatctgcactcgccgggaaatagcagcgcgcccggcgagcagaagcaccaggatggtgcaaatgcactgttaagcacgaagtatggcaccggaccatatggtgatcgtttttttgccggagagcacccgattgaacgacgtaatgccccgcccacaggcgaaagcccccaaagcgctgaccccgctactggaaatccgtaacttaaccaagtcgtttgatggccagcatgcggtcgacgacgtcagtctcactatctacaaaggcgaaatttttgctctgctgggcgcgtcaggctgcgggaaatcgacgctgctacgcatgctggcgggctttgaacaaccgaccgccgggcaaattatgctcgacggcgtggatctggcgcgcgtgccgccctatcagcggcctattaatatgatgttccagtcctatgccctgtttccccatatgaccgttgagcagaatattgccttcggcctgaagcaggaccgcctgcctaaggcggaaatcaccgcccgggtgcaggagatgctggccctggtacatatgcaggagtttgccaaacgtaagccgcaccaactctcaggcggccagcggcagcgcgtcgcgttggcgcgcagcctggcgaaacggcccaagctgctgctgcttgatgaaccgatgggggcgctggataaaaagctgcgcgatcgcatgcagctcgaggtggtggatattcttgagcgcgttggcgtgacctgcgtgatggtaacccacgatcaggaagaggcgatgaccatggcgggccgtatcgccatcatgaatcgcggcaagtttgtgcagattggcgaaccggaagagatttacgagcacccgaccacccgctacagcgccgagtttatcggctcggtgaacgtctttgaagggctggtgaaggagcgtctggaagacggtctggtgctaagctcgccggggctgatgcatccgctgaaggtcgaccccgacgcctctgtggtggacaacgtgccggtctgggtggcgctgcgtccggagaagatcatgctgtgcgatgaaccgccggcggacggctacaattttgccgtcggcgaggtgattcatatcgcctatctgggggatctctctatctatcatgtgcgcctgcaaagcgggcagatgatcagcgcccagctgcagaatgaacaccgccatcggaaagggacgcccacctggggcgatgaggtgcgtttatgctgggatgctgacagctgcgttgtgctgacggtgtgaggagagggcgatgaataccgttgaatccccgtcaggggcgaaaaaaccgggcggcttcgcgctgtgggcggcgcgcctgcagatggcgcatggccgcaagctggtgattgcgctgccctatctgtggctgatcctgttgtttatgctaccgttcctgatcgtgttcaagataagtcttgccgagatggcgcgggcgatccctccctacaccgagctgatggagtgggcggacggccagctgacgctgacgcttaactttgccaacttcctacagttgactgacgatccgctctattttgaagcttatctccagtcgctgcaggtggcgggtatctcgacgatctgctgcctgctgctgggctatccgctggcctgggcggtggcgcacagcaagccgtcgacgcgtaatattctgctgctgttggtgatcctcccgtcgtggacctcgtttttgatccgcgtctatgcctggatggggctgctgaagagcaacggggtgttgaataacttcctgctgtggttaggggttatcgatcagccgctggagatcctgcacaccaacctggcggtgtacatcggtatcgtgtatgcctatctgccgtttatggtgctgcctatctacaccgcgctgacccgcatcgactattcgctggtggaggcctcgctggatctcggcgcccggccgctgaagaccttcttccaggtgatcgtcccgctcaccaaaggcggcattatcgccggctccatgctggtgtttatcccggcggtcggcgagttcgtgatcccggaactgctgggcgggccggacagcatcatgattggccgcgtgctgtggcaggagttctttaacaaccgcgactggccggtcgcctcggcggtggcgattgtcatgctgctgttgctgatcgtgccgatcatgtggttccacaagcaccagcaaaaacagatgggagagcagggatgaacgacttgccggtagtacgctcgccgtggcgcattctgatcctcgtgctcgggttcaccttcctctacgccccgatgctgatgctggtgatctactcgttcaacagctcgaagctggtaacggtctgggccggatggtcgacgcgctggtatagcgaactgttccacgatgatgcgatgatgagcgcggtaggattgagcctgaccatcgccgcctgcgcggcgacggcggcggcgatcctcggtaccatcgccgcggtggtgatggtgcgctttgggcgttttcgcggctccaacggcttcgcgtttatgatcaccgcgccgctggtcatgccggacgtgatcaccggtctctcgctgctgctgctgttcgtggcgctgggacatgccatcggctggccgtcggaccgcggcatgttgaccatctggctggcgcatgtcaccttctgtaccgcctacgtggcggtggtgatctcctcgcgcctgcgcgagctggaccactccattgaagaggcggcgatggatcttggcgccgcgccgctgaaggtcttcttcgtcatcacgctgccgatgattatgccggcggtgatctccggctggctgctggccttcacgctgtcgctggatgacctggtgatcgccagctttgtctccggtcccggggccacgaccttgccgatgctggtcttctccagcgtgcgcatgggggtcaacccggagatcaacgccctggcgacgctcatcctcggcgtggtcggtattgttggttttatcgcctggtatttgatggcccgcgcagaaaagcagcgagtgcgcgatatccagcgtgcaagacaaggctgaaccacctaaaatcggtacagcagcctccggtcggcgccaccctgtggcgccgttttcatggaagacattacgttgggattgtttacgaaaactcgctcatcgcatgcccgccttaacgtccctgcgctggtgcaggtggcggcctttgctattattttgattcgtggcctggatctgctgatgatccttaatctgttgggcctgcaggggctgaacgaattcatacaccgcagcgttcagacctggaacctgacgctggtcttcctcggcagcctggcgctggtgtttatcgagatctggtgcgccttctcgctggtgaaagggcgcaactgggcgcgctggatctatctgctgacgcagattatcgctgccggctacctgtgggcggcgtcgctgggctacgggtatccggagctgttcagcattcccggggaatcaaaacgagagattttccactcgctggtgatgcaaaaactgccggatctgctggttctgacgctgctgttcgtgccggcgaactgccgtcgctttttccgcctgcaataacggtgatacaatccccgcccctggatttttgaaggtcaattatgcattgcgcactctacgacgccggccgctgccgctcctgtcaatggctggagcggccggtcccgcaacagctcgccgataaaatggccgatctgcgcacgctgctggcggcgatcccggtcgcagcctggggcgagccggtcagcgggccggaggcggctttccgtaacaaggctaaaatggtggtcagcggcagcgttgagcgtccgctgctggggatgctgcaccgcgatggcactccggtggacctcaccgactgcccgctctatcccgccgagtttgccccggtttttgctgccctgaagccctttatcgcccgcgccgggttaacaccttacaacgtcgcgcgcaaacgcggggagctgaaatatctgctgctgaccgccagccagcagggggagatgatgctgcgcttcgtgctgcgctcagaggccaaggtggctcagctgcgcgccgcgctgccgtggctacaggcacagctgccgcagctcagcgtgatcacggcgaatatccagccggtgcatatggcaatcatggaaggtgagcaggagatcttcttcaccgaacagcaggcgctgggggaggtctttaatggggtgccgctgtggatccgcccgcaaagcttctttcagaccaatccggcggtagccagccggctgtacgccacggcccgcgactgggtgcgcgcgctgccggtccagcatatgtgggatctgttttgcggcgttgggggatttggcctgcactgcgcgacgccgacgatgcgcctgaccggtatcgagatcgccccggaagccatcgcctgcgccagacagtcagccgcgcagctggggctcagcaatctgcattttcaggcgctggactccacgcagttcgccactcacgaagcggatgccccgcagctggtgctggttaacccgccgcgccgcggtattggcgctgaactatgcgactatttaagccgcatggcgccgccctatattatctattccagctgtaacgcccgcaccatggcgaccgatatcgctcgtcttagcggctatcgcgttgagcgggtccagctgtttgatatgttccctcacaccgcccactacgaagtgctgaccctgctggtccgcgaagtttaaacaaaatgtgaaggctttgcgccgctgaaatcgggtaagcttgaggcagcatgttttgttattggtggggggaatctaatggccaaaaccattctgctggtggaagatgacgaggatatagccacgctgctgcggctcaatcttcaggatgagggctatcagatcgtccatgaagccgacggcggccaggccctcgcccggctggagacgcaggtctgggatgcggtgatcctcgatttgatgctgcccggcgtcgatggtctggagatctgccggcgtatccgccagatgacccgctacctgccggtgattatcatcagcgctcgcaccagtgaaatgcaccgcgtgctgggcctggagatgggcgccgacgactatctggcgaagcccttttcactgctggagcttatcgcccgcgtcaaagcgctgtttcgtcgccaggaggcgatggggcagaatctgctgatggacgccgggcgcctgtcctgccatggcctgagcatcgacccgctgtcgcgcgaagtgaagctgcgcggcgagacggtggacctcacgccgcgtgaattcgacctgctgtattacttcgcccgccaccccggggaagtgttttcccgcctggcgctgctggagcaggtctggggatatcagcacgagggctatgagcataccgtcaatacccatatcaaccgcctgcgcagtaaaatcgaacgtgacccggccgagccggacatcattcttaccgtctggggaaaaggctataagttcgccccggtgacgcaagaggccgccccgtgatccgccgcctgagcctcagccagcggctggcgctggtggtggtttccctgctgatgctatgcgcggtggcggtatgcgccgtccagttacacagcagcgcgcagtatggcaacgccatggtgcagcgtctgtcgtccgggctggctcaacagattgtcgcccgcgagccgttgctggacgcccacggcgaggtcaaccggcaaaccctgaagtcgctgtttgaccgactgatgacctttaatcccagcgtggagctctatctgctgtcgccggatggcgacctgctggccgatgcggcgccgccgggccatatccagcgccagcgtatcgacatggcgccggtgcaggcttttctcaccggcagtgcgtcgccggtgtatggcgacgatccgcgcagtcccgacggacgaaaagtcttcagcgccgccccgctgcgcgtcgacggccaactgcgcggctacctgtatatcattttgcagggggagacgtttaatcagctggcggccgacgcctggcaaaaaacgctgtggagcattgttctgtggacgctgctgctggtggccctgtttggcctgctggcaggggggctggcatggttctgggtcacccggccggtccgcctgctcaccgcccaggtggcggcgagcggccaggacagcatcagcgccatcaaaaccctggcggcccgcaggccggagccccggcctggtaacgaggtggcggtgctcgagaaccgctttattgaccttgcccggcagattgccgatcagtgggatcggctggccgacagcgatcgccagcgccgtgaatttgtggccaatatctctcacgatttgcgcacgccgctgacttcgctgctggggtatctggaaacgctgaccctgaaggatgaatggctgaccgccgaggagcgcaggcagtatctcaccatcgccctgcgccagggcaacaaagtgcgccatctttcgcagcagctgtttgagctggcgcgactggagcatggaggcattaagccgcagcgcgagcgtttcgcgatgggggagctgatttccgacgtggcgcagaagtttgaattaactgcccgcacgcgcgaggtgaacctgcatattgatgtaccgggaccgctgccgctgattaacgccgatgtgtcgatgattgagagggtggtgaccaatctgctcgataacgcgatgcggcatactcccgtcggcggggagatccgtctggcggtctggcaggagaatcaacagcttcaggtcgaagtggcagacaacggagcgggcgtcgatgccgcgctgcgcgacgatctgttccagcggccgtcggcgttgtctacccaggcatcgcgggaggatcgcggtgggttagggttgctgattgtgaaacgaatgctggagctgcacgggggcgatatcagactggtggagtcggtaagcggggcgcggttcaggttcttcgtgccactttgagaaatcgccgggtaaggcgtagccgccacccggcgaaaaaagttactccgggaaccactggttgctaattttctggtaggtaccgtcggccttaatcgctttcagcgcggcgttcagtttctccagcagcgccttgttatccgggcgcacggcaatgccgagtccggtgccgaagtattgcgggtcggtcactttcggcgtggctgcccccagctgcgggttagttttcagccattcgttgaccaccgcggtgtcgccgaacacgccgtcgatacggccatttttcaaatcgataatcgcattctggtagctgtcataggcgacggtcttcacctcaggatgcttatcctgcagatatttctggtgggtggtgccgttttccatgccgatccgtttgcctttcaggtcatcgaaagaatggaacgcatcttttttggcgatcaccagcgccgagttggcgtagtacgggtcggtgaaggccacctgcttgctccgctccggcgtaatatccattccggaaatcaccgcatcatatttcttgaacttcagcgccgggatcaggctgtcaaacgcgtggttggtaaaggtacattctgcctgcatttgtttgcacagcgcgtgggccagatcgatatcaaagccgacaatctggttattagcgtccatcgattcaaacggcggataggttgcggagacgccaaagctgattttttccgcggcagcggcgccgaacgcgaaagaggtgagcaatgcagccagaactaactttttcatcgtggaactcccgtctgtcaatcttatgattattcaccgtgtctgcggcatagagtgacaatgccattaaatgaatttatatgcaataaaaatgattaagtatttttatcgtcataaaaaaagacggacaggtgttagacttgtccgccttgctgtttgctttttatgcaatatgctcaggtgctagctacgtcgctcgaaggccagcgctttgcgttccaccaggcgcatcagcagcgtcagcagtccattaacgatgagatagataatcccggcggcgccgaacaccatcacgtcgtaggtgcgtccatacagcagctggccgtggcccatcacttccatcagcgtgatggtgtaggccagagaggtactcttgaaaaccagcaccacttcgttggaataggacgatagcgcacgcttaaaggcgtacggcagcaggatcgccagggtatcctttttactcatccccagcgcgctgcaggactgccattgcccgtcggggatcgcccggatggcgccataaaatagctgagtggtgtaggcggcgctgttgagcgacagagcgatcagggcgcacagccacggctcggagataagatgccacagccacggataatcctgcagcgaaggaaactgtcccgggccgtagtagatcaggaagatctgcaccagcagcggcgtaccggtaaacaaggtgatatagccgcgcaccatccataccagccccggcgtcttcagggtcaggataatggtgaagatcagcgacaggatcagcgccacgataatcgacgccacggtcagcgtcaggctggtatgcagtcctttcagcagttcgggtaaatagtcgagcatcagcctggtctccgttcgaagcgcgtcgcacgctggtcaatccgcttaaggatgtattgactcaacagggtgatgacgagatagattgccgccgcaatgatataccagttaaagggttcctgagtgcgggtggcgatgcttttggtctgcagcatcagatcgttgacgctgatcaggctcaccagcgcggtgtccttcagcagcaccagccactggttaccgaggccgggcagggcatggcgccacatctgcggcatcaccagacggaagaatatggccgctttcgacagccccagcgcctggccggactcccactggccctgcggaaccgctttcagcgcgccgcgcagcgtttgcgaggcgtaagcggcatacagcagcgacagggcgatcgccccgcagaggaacgggctgacgtcaaagttctcaatctgcatctgcaccgggatctgcgtgaacccgagcgggatggtgaaaccgtcagagagcgtcagcagcagctgggaagagccgaaatagataaacagcaccaccagaatttccggtagcccgcgcaggatggtcactatgccggttgcaagccaggctaccgggcgccatttcactgactccagtaccgcaaagagcatcgccaggaccaggccgatgacgagcgcgcaaacggcaaggccgacggtcatcccggcggcgcttgctaatggaaaaatttcgttcattcagtcttacttctggaaccatttgttatagatggtctggtaagtgccgtctttcttcactttttccagcgcagcgttaaatttctgctgcaggtcggtgttgccctgacgtacggcaatgcccagcccggtgccgaaataggctttgtcggtcactttatcgcccacggccgccagcttcggattgctcttcagccattcggtcaccacggcggtgtcaccaaagaccgcgtcgatacgaccgttctgcaggtccagcttcgcattctggtagctgtcgtaaggcacggtagtgatttctggatgtttatcggtgatgaatttctggtgggtggtgccgttctgcacgcccacttttttgcccttcagctggtcaatgctggtgaacttaccctgctggccgacgaacagcgccgagttgtcataatacggggtagagaacagcacctgcttttcacgctccggcgtgatgtccatcccggccatgaccgcgtcgaaacggcggaatttcagtcccgggatcaggctgtcaaaggcctgattggtgaaggtacaggtggcgtcgatctctttacacaacgcgttcgccagatcgacatcgaaaccgacgatctggttgttggcgtccaccagctcaaacggaggataagaggcctcggtggcgaaacgaatggtctgcgcggcggaagcggagaggctcatgcctgcgagcagggcggcaatcagtacttttttcatcgtcatttccccgaaaaacatcaatgtgaaagatagtttttaaacgcgtcagtttgcggatgcgtgaagcaggaggcatccccttgctcgacgatatggccattttccatatacaccacccggctggccgtcttgcgcgccacttcaacttcgtgggtgacgataacctgggtgatgccggtttcagccagctcgcgaatgatgctgacgatctgggcagtgatttccgggtcgagcgccgcggtaggctcatcgaacagcagaacctgcggctccatcatcagcgcgcgggcgatagccacccgctgctgctggccgccggataaatgcagcgggtaacgatcgctgtacggcttcagacgcaggcgctccagcagcttctctgcgcgagccagcgcctgatccttgcttaaccccagtacgcggcagggggcctcgatcaggttctgctgtaccgtcaggtgcggccacaggttgtattgctgaaagaccatgccgacgttctgacgcagctcgcgaatcgctttatcgggcggcgctctggtgaagtcgaattggttaccggcgatggataacgaaccggaccgcggcatctccagcaggttgagtacgcgcagcagcgagctcttcccggcaccgctggggccgagcagcaccagcgtttccccctgcgggcaatccagcgtgatgtcgaacagcgcctggtgtgcgccgtagaagcaattaatgccgtttagtttaatactcatctgggcagtctgatacgaatagctattgaggccgcaaatactacctttggcagaatagttatgcaatatttatgcgttaaaagttaaatctaaaccacgtttagctttaaagttagcacaaaatatggcctggtgggtgaggggggcgcaaatgtcggcattcctggggcgaataccgacattttaccggggttatcgtttcagcggcgtcgcttcaactccggaatcagcgtttctccagactctgtcgcagcgtcccggctggcgcatggctgttgttgccgagatagcgaacgtcatcgacggcccagcactggccttcctggatcatcagcacttcatctttccagctctgggtgccctgtttcagatcgacgcgcagcggaatattgcgcgcatcgcggttcgggatggtggaggcgctggcgaccacggcgctgtctgccggggtgctgctgctggagaacggattagcctgcagtaatttgctgttggcgggatcctggcgggcgtcattgagtaactgcgccaggccgtcgctcagataggggcgcagcgccgccggatcctgagtacgattctggatctgggtgtcgtagaatttttgcgctacgtcgtcagggccgccttcgacgcaggggccgctgcgggtgccattatctttataggccggggtgacggtcgtacaggcgctgagcgccagcgcgcaagggagaagtacagcaaaaagtttgtagcgcatgatgatttccttataagcgaactacgttttcagtttccgttaaagcatagcgtatagcgtgcggattgtacttgacgcaaagagctaagaccttgatgtggctacagccttagggcgggaaatcggcacggggatgacagaattccgtcaggcgctaaaaggcagggcagtataaaaataaacttaattttcccgtgaacaagaaatattaccccgtaaaatagggaaatggctcttgaaagataagggtaattatttcttcttatagatgcgagtggcgacgtgcatttttttatccgtattaccgaaggacgggacaatgacgccccccttgttcatttgtttttttaatcagctcttcacgggcatcgttggatgcggtttgaccagtagaggaaatggcgccgattttggtatattgcgtatggactttatcaaaagctgttttgttaaaatttctgcggagacggcattggccgcttaaaacaatgctgtacctgccactaaagctgcatatttaatattcttagcccctattgtttatctcgctatcatcatgctcttgtttgcattcaccaatgaatgattcagattgaactcacactgctttttgtaagcaaaatgctgcaatttaatgacggttagttaacgctttttagcgaaaagatgacgtatttcgcagtgctgatgcttgttttttgagccggttacccatcgggagcggaccaggctattttcttcggtcgttagctgaaaatcaccctgagaggccggagctgaggggatagggcgctgacagacattcccggtaacatggtttatcatatagaaaagcaggggctgcgcccatggtcatgcaggtcaccagggagttaagatgttaacaaataagcgagagcgcgcccggcagcagcgagccgcgttgtgggccaccagagataatgtccagcgccatgcgctgtccatgagtatgccctggctggcctttgtcaatatcgcttttgcgttaatgattttcttccgcaattttatctttacctattttgataagaggctactgacgcaccgggcggttattccttatatcgaagcggcgttgattgcggttattatcatttcggccattttagtgattattgccctcacgccgcgactggcgcagggacgatatacgttgaatatcatcaccgggctgctgctggcgctcagtctgtgctggtccctgagtaattattgttttatttttttctggaccttgccctttgcctggccgctgctggtgatattaatgactaccggcctcaccgcgctgtatcaccattggcccggcataaccgcttttatgctgccgctgtgggtgaccgccttgctggcgggaatacagctccactatcacaccgagatccgctttttgatcctctgggccatttttaccgcgattttgctgtatggccgacgtattttgcagcgctggtatgacgaagcctgggatacccaccaggagaatatgcagcttattcagcggctggaaagtatcgccaaccaggatgccttaaccggaaccgctaaccgtcgggcgctcaatgcttacctggcggcgatctggcagcaaaaaacgccgctggcgctgatgatgatcgatgtcgattattttaagcgctataacgatcgctatggccatcaggctggtgatgagtgcttatcttctgtcgcgcaggtgcttaaaatggcggtccgggcggagggcgatctggtggctcgctacggcggcgaagagtttgtcgtcgtgttgcccggggtgtccttagcgcatgccaccgctattgccgagcgcattcagcagaagatccgcgaggcaggcctaccgcacgccgcttcggcggtggcgtcggaggtcaccgtgagtatcgggatcgtcgcctccgatggcacggtcccgatagagacgctgatcgcccgggcggacagggcgctgtatcaggcgaaaaataaaggacgtaatcaatggtcttattaacccggagacgctgccgggcaagggagaagggatgaaacggatgatgcggatcgtgctgctggcgctgctgctaaccggctgcgctggggaaaagggcattatcgatcgcgacggataccagctggacacccgtcatccggcgcaggctgcctatccgcgaataaaggtgttagtgatccactatacggctgacaattttgatgtctcgctggccacgttgaccgataaagaggtcagctcccactatttaattcctgaacagcccccgcgttatcagcataaaccgcggatctggcagctggtgccggaagaggatttagcctggcacgccggggtaagctattggcgcggcagtacgcgcattaacgatacctccattggcattgagctggagaaccgcggctggcagaagacggcgggcgtcaaaagttttaccccctttcatccggaacagattgcggctctgatcccgctggcgcgcgatatcatcgcccgctaccacatcgcgccgcagaatgtggtcgcccatgcggatatcgccccgcagcgcaaagacgatccggggccgttattcccctggcaacagctggcgcagcaggggatcggcgcctggcctgacgagcagcgggtggccttttatctcaacgggcggccggccagcgagccagtggaccccgaaatcgtactggatttgctctcgcgctatggctatcaggtgacgtcggagatgacccccgcgcagaagaagcgggtgattatcgccttccagatgcacttccgtccgcagcgctgggatggggtagcggatgcgcaaaccgaagcgatagccgaggcgctgttagaaaaatatggccagggttagcggtgtagtttaccgtggtcgcgaagccaggcggcggtgcgcacgatgccgtcgtcaagcgtcaccaccggctgatagcccagctcgtcctgcgcgcgggtgatatcgagcgtaaaatcaaagttaagcttggagacgccgtagtgggtaaacgcgggttctttggcggttttatcgccaaagcgctccatgctgcgggcgataatatccagcatcggatagggaactgagcggatccggcatttgataccgagctcgtcgatcaatttctgcacgatgctccgcaaggtgcgcggttcgccgttgctgatattccacgcgcgggcggagggaagatgatcgcaggccggctggctcgccagccacatcgcatgtacggcgttttcataataggtcatgtcgaccagcgcgctgccgccgcgcgggagcaggacgctgccataatgctgcatcatttgcgccagccgggggataaagactttgtcgtgcggcccaaacaggctctgcggccgcagaatggtaaaacgggtatgcgggttggcctgcgccagcaggttgatcacctcctcgctggccgccttgctgcgggcaaactcgttggcgaagcggtgtggacggaaatcttcctggatatcacgatgatggtgataatcaaaatagagcgatggcgaagagatatggacgaaattgcgcactccccatgccactgaccattcgcccagacgacgggtggcgcggacgttagcgagatcgaaagcctgctgagtgccccatggcgaggtaaagctggagcagtgccatagggtatcgataccggcgagcatcactttagcctgcgaagagaccagctcggttaaatctgccgggatgaattccgcccccattttgctcagaagcttgcccatcgcttcgttgcgcccggtcgctcgcacgctgatgcccttgttgcgcagatattccactgcgttgcggcctaatccgctggtcgcaccggtaaccagtaccttcatatcactctactgtcccagaaaagaatttcgtgcgcatttttccgtgattctcccgactatgcaatgagaatcatgaaagaataacgcttatccttcgactctgcctgagatttgttcggccagccgggcgatgcgttgcgccataccgcggaaaataaacaggtgcgccgggatcatcagcagccagtagatcaggcctggcataccgtgcgggtgccaccaggcgcgcacgtccagttcacgacgatcgcctttatcgttaatggtaaagcttaatcggcccagcccgggcgctttcataccgaatagcagggtgagctgtttttcttcctccacgataattaccttccagctgtcgaccgtatcgccggtttgcagataagcgcgctgcggccgccctttggccagccggtggccgaccagcagatccatcgcgccgcgggttttccacagcagattgccgaaaaaatacccctcttccccgccgatttggttaacgacctgccacagggcctggcggcttgcctgagtggcgacggtgcaacctgcctgcttcggatagtagccgtactctggtcgccagcgggcgaaagcctgagcgtcgtagccccagtcgctggagtttactaactgctcttcttctttcagcgtgcggcgaaccgcctgatcgaaggggatcagcgtttgcgggatcagcgcccgcagcgcccgatcgtcagcgattagatcgtgcttcagcccctgaatcagcgccttggcgatggtcggcggcaccgaggtgatgacattgaggaaccacaccgagatccagcgcgtcggcaggggaatgggaatgagcgggcgatgtttaccgctgacggccataaagcgaatgaactgctgctgatagcttaacacctccggaccggcggcttcgaagacgcggtgcgcatcggagggatgattcagcagctcaaccaggtcaacgagcaggttttccagcgcgacaggggtggtacgcgaacgtacccagcgcggaggggttagcaccggcaggttataaaccatgtcgcgcatcacctcgaaggcggcggagccggcgccgacgataatcccggcccgcagctcggtcaccggcacgcccgactcacgcaggagatcgccggtaatctgacgagcgcgcagatggtcggactgctcctgcgccggggcctgcagcgaactgagaaatatcacctggcgcactgatgactgacgcagggcatcgcgcacatacgtcgccacccgccgctcatgggcgataaaatcaccgccttcgcccatgccgtggaccagataataaagggtatcgataccggtgagtagcgcaggcaggtcctgcggctgattgagatcgactgaccggcaggtaacgccgggcaaagcgagtttttgcaatcggtcgatatggcgtgccgccgccagcaccggatagccccgcgcgcttaatgcgcgcaccaaatgctggccaatatagccgctggcgccgagcaccagaactgattgcgacacgcctgactccttagcgttgtaaaaaagcctgccagtgggcgaccacctcgctcagctgctgacggttgacatccaggtgagtgaccagacggacaacaggcgaggcgttaatcaataccccctgcgcctgcataaacttgccgagcgccggggcctgctcttcgccgacgcgaacgaacagcatgttggtatcgttacgggtgacgtcggcgccgatagcgcgcagctgctccgccatccacgcggcgttgtcatgatcctcctgcaggcgctgcacgttatttttcagcgcgtacagcccggcggcggccaggatgcccgcctggcgcatcccgccaccgaccattttccgccagcggacggcgcggcgaatgtacgcctcgctgccgagcagcagcgagcctaccggagcgccaagcccctttgacaggcagatggtgaaggagtcgcagtattgggcgatatcgcgtaactcgcagccgtaggccaccacggcgttaaagatgcgcgcgccgtcgacgtgcagcgccagattgcgctggcgggtaaacgcccaggcttcctgcagatagtcgcgcggcagcaccttaccgttatgggtgttttccaggctcagcaggcgggtgggggcaaaatggatatcgtcgggtttgattttcgccgccactttatccagcggcagcgaaccatccgccgcggcgtcgatcggctgcggctgaatactgccgaggaccgccgcgccgccggcttcgtacagatagttatgcgccccctggccgacgatatactcttcgccgcgctggcaatggctgagcaggccaacgagattggcctgggtgccggtgggtagaaatagcgccgcttctttgccggccaggtcggcggcatagcgctgcagttcattgacggtagggtcgtcgccatacacatcgtccccgaccggggcggccatcatggcctccagcatggcgcgcccgggacgggtaacggtatcactgcgtaaatcgatcacggcttttccttggtctggttcaacgtattgcttctgttttacctgagccagttggttttcgccagttcgatgacctcatcgccgcgcccgctgatgatcgcccgcagcatatacaggctaaagcctttggcctgctccagcttgatctgcggcgggatcgccagttcctctttggcgacgacgacgtcgaccagcaccggaccgtcggtgcggaaggcggtctgcagcgcttcatccacctcggaggctttttcaacgcgtatacctttgataccacaggcctcggcgatgcgggcgaagttggtatcgtggagctccgtaccgtcggtgagatagcccccggccttcatttccatcgccacgaagcccagcacgctgttgttaaagatgacaatcttcaccggcagcttcatctgcgccagcgacagaaaatcgcccatcagcatgctgaacccgccgtcgccgcacatggccactacctgccgctccggcgcagtggccttggcgccgatggcctgcggcatggcgttggccattgagccgtggttgaacgagcccagcaggcggcgtttaccattcattttgagatagcgtgccgcccagacggtcggggtgccgacatcacaggtgaaaatggcatcttcatcggcaaaatgactgatctgctgcgccagatattgcgggtgaatggctttatcgctgggtttagccagatcgtcgagcccttttcgcgcgtcgcgatagtgctccagcgccttatcgaggaagtggcgatcggttttctcttccagcagcggcagcagcgccttcagcgtcgatttaatatcgcccaccagcgccatgtcgaccttactgtgtgcgccgatgctgccggggttgatgtcgatctggataattttcgcgtcggttgggtagaaggcgcgataggggaactgggtacccagcaggatcagggtatcggcgttcatcatggtgtggaagccagaagcgaagccaatcagcccggtcatgcccacatcgtacgggttgtcgtactccacgtgctctttgccgcgcagggcgtggacgatgggggctttaattttggctgcgaactccaccagttcctggtgggcgccggcgcaaccgctgccgcacatgagcgcgatattgctggagtagcgaataagctgcaccagcttgcgcaactcttcttccgccggggtgaccgtcggcagcggcgcatgataccagtggctgctggcgctttccggggcggccttcagtgccacatcgccgggtagcaccaccaccgagacgccgcggttaatcactgccttacgcatcgccactgccagcacctgcgggatctgttccggcgtggagaccagttcgcagtaatggctgcactcgcggaacagctcctgaggatgggtttcctgaaaatagccgctgccgatttcgctggatgggatgtgggcggcgatggccagcaccgggacatggttgcgatgacagtcaaacaaaccgttaatcagatgcaggttgcccggtccgcaggagccggcgcagaccgccagctcgccggtcagctgcgcttccgcgccagcggcgaaagcggcgacctcttcgtgccgggtgggcatccagtcgatggtgcccatgcggttaaggctatcgctcaatccattgagggaatctccggtgacgccccagatacgtttcacgccggcctgttccagcgttttggcaatgtatgccgccacggtctgtttcatgatctccatctcctttttttgataacgccttcaagcttagatgaaactgaccgcaatgtaaccgattacccctgattttttgctggttttattcctctccggctgcgcatactcaggaagtacacaggatgcaaaacaggatgcacatcaaatggttaaaggattgttaaacacagtaaatcgcaggctgtcacatgatgacgccggtaaactcttgttacgacttgccgtcggcggcttaatgcttttccatggaatccataagctgatagatggtgtggatggcattagcgggatgctggcggcgcagggattgcccgggtttatcgcctacggtgtgctggtgggggaagtggtcgctccctgcttgttaattctcggcgtcctgacccgcccggcggcgttggtgctggcgttcaccatggtggtggcgtggctgatggtcggcttagataagacgtttgcgcttgatgcggtgggagcgtgggccattgagaatctggtctatttctttgttggcgcactggcgattgcgctactcggcgcggggcgttattcgctggccggtcagtcggcctggcggtaaaaatgcctcattcgtcctggggcgtaaagtcgatactgttggcgatttgcaattttttcagtccgggaaagcgtttatctcatgtcgcctgagcgtttgtttattgtcgccagggattttcccggaggcggcgcattgcgccttctccgggctaccaaatcgcacagcgatgtagccccggtaagcggtagcgccaccggggattttgacctcaggcgagaaccagatcgctctgcggatgacaggagcaggccagcacatagccgtcggcgatttcggcgtcggtcagcgtcatggtgctggtgacgctgtacttcccggaaaccactttggttttgcagcagccgcagacgccggcgcggcaggcgacggtcaccggcactttattgctctccagcgcgtcgagcagcgtggtgcccaccggcgcgtaaaactcgcgcgccggctgcagtttagtaaatttcagcccgctggtggcggcctcagccaccggggtgaagaatttttccttaaagaagcgggtgacgcccagggcggcaacatcctgctcgaccttctccatataaggcgccgggccgcaggtcatcacggtgcggctggctaaatccggcacgctctgcagcagctcccgggtcagacggccggcgacaaaaccatgcgtcgcattgtgctccgctaccagggtgaccgggtagttgcgccactcttcggcaaagattacatcttccggcgaacgcacgttataaatcacctgtacgtcggcctgcggtcgatacttagccagccagcggcgcatcgccatgatcggtgtcacgccgcaaccggcggccagcagcaggaatttatcttccgctttatcgtcgcaggtaaactcgcccatcgcatcggacagccaaaggtaatcgccgcgtttgacctcgcgggtcaaccactgcgaacccgtaccctcgtcaatacggcgaacggtcagcgtaatgtattcgctgacccccggcgtcgaggagagggtataggcgcgcagcgtttccgccgagttacgcacgctaaccagagcgtactggccagcgcggtacggatagtaatcgtggcacagcagcgaaagggtccacacgtccggggtttcctggtgaatgtggtgaacctgcatccgccacgggcactgggaggttggcatagtcatcagggactccttaagcgctcagcagctgctgcatatcttgttccacggtggtcacggaacgcagaccaaacttctcattgaggaccgccagcagatccggtgtgaagaaaccaggtgccgtcggaccggtgacgatgtttttcacacccagcgacagcagcgtcagcaggatgacgatcgctttctgttcgaaccaggagagcaccagcgacagcggcagatcgttgacgccacagcccagtttctccgccagcgtgaccgccagaataatcgccgagtaagcgtcattacactgcccggcgtcgaccaggcgcggcagcccttcgatatcgccaaagtccagtttgttgaagcggtatttaccacaggccagggtcaggatcaggcagtcatccggcacgctggtggcgaaatcggtgaagtagttacgctccccgcgggcgccgtcgcagccgccgacgaggaagatatggcgcagtttttcacgactgaccagatcgatcagcgtatccgccgcgccaagcagggtctgacggccaaagccgacggtgatcagatgcgggatttcgctgtacgggaagcccgccatctgctgcgcctgggcaatgaccggggagaagtcttcaccttccagatggttcacacccggccagccgacgatgctgcgagtccagatgcgatcgtcgtaggcgccgacggtcgggtcgatgatgcagttagaggtcatcacgatggggcccgggaagcgggcgaactccacctgctggttttgccagccgctgccgtagttgccaatcagatgtttgaatttacgcagctccggatagccgtgagccggcagcatttcgccatgagtatagacgttgacgccggtgccttccgtctgctccagcaggttacacagatccttcagatcgtggccggagatcaggatgcacttcccttcggttgctttaacgttgacctgagtcggcgtcggatggccgtatttggtcgtttcaccggcgtcgaggatgctcatcactttgaagttcatctggccgatttccatcgaacattcgagcagcgcattcatatccgcaggccaggtgcccagccatgccatgattttatggtactgggcatagatagcgttgtcgtactggccgagcacgtgggcgtgctccatataggccgccgcacccttcagaccgtacaggcacagcaggcgcagaccgagaatattttcgccgatggcggctttatctttattcggggtatagtccgccgcctgacgctgcaggtcgcccagatcgtcgctgaccagctgcaggtcggcgaccgggctgtcgaccgcggcgctggcatcgatcgccaggcattgcgctttcagcgcctcacgcagggcaattgcctggcgggcgtagccgacgatgcgcggggaatcgaagttaacgttagtcagggtggagaagaaggcgcggggggcaaagctgtcgacctgatgatcgataatgccatattcgcgcgctttaagcgcccaggcggacaggccttgcagtgacgcaatcagcagatcctgcaggtccgaggtttccgctgttttaccgcacatcccctgcgcgtaagagcagccgttgccggctggggtacgaatggtttgttcacattgcacacaaaacatggtcacacctttaaagttatatttgatatacatgtttaaggttatgccgcgcggcaacgggtgaaaaggtatttctcagacaacttaaagggagattgatttagcgcaaatttggcggcaggagggctgccgccagcgggtgctcaggcggtaaaaaaggcgatcaggatcgggaccagcaaactaagcagaaaaccgtgcacgatggcggcagggacgatttcgacgccgccggaacgctgcagtaccggtaaggtgaagtccatcgaggtggcgccgcacagccccagcgccgtggagcggctgcggcgaataaggcccggaattaacatgatggccagcagctcgcgacagagatcgttaaagaacgccgcgctaccgatgaccgggccaaaggattcggtgagtaaaataccggagagcgaataccagccgaaaccgctggccattgccagaccggtctttaacggcagaccgagaataaaggcgttaagtatcccgccgagtaatgaactggccgtaaccaccacggcgacgatcattccccggcggttaaggactatttgtcgcagactcattccattattgcgtaattggataccaacgaggaacaggagaaaaatcaacgtatattcgctggcttctgtcgcgtgctgtaaaaaaggcagtctggtcagaccgagcagaaaaccgagcacgaccacaccgcacagctgcagcgattccagggccatggccaggcgcgagggtaatttctcctgacgatgctgactgcgccatggcattttactttccagccacagcagtgcggcgatattacacagtaaaatgataaccacgctcaccgcggcgtaatgcaatattgccagcaggttgctggccagattgtcgaggaacgccaggctgatacccataaaaaaaaggattacatagacaatccagctgagcatgcggtttatcagctttagcgcggaggagtgacgaagaggcagtaaatagccgacgaccagcggcaacagaataataaagagtcccgaaaacatgaacgatgcagcccttgcatgatgagaatagcgcccatgacactacccaaatcaccgggccgagtaaagctgtcgccagaaagaaaaagcccggagacccgggctttgaaaagcgttaatcgcgtttttccagcagggtgcgatacagcacgccgccgaggatcccaccgacgattggcatgacccagaacagccacagctgctgcagcgcccagccgccctggaaaattgccaccgcggtgctgcgcgccgggttgaccgaggtattggtgactggaatgctgatcaaatggatgagggtcagcgccaggccgatggcgatgggggcaaagcccgccggcgcatgtttatcggtcgcgccatgaataaccagcaggaagccgcaggtcaggacaatttcaatgacgatagccgacagcatggagaagccgcccggggagtgttcgccatagccgttggaggcaaagccgctggcggcggcatcaaagccggctttaccgctggcaaccacgtacagcaccgccgcggcaataattccgccgaccacctgagcgataatatagccaatgacctcttttgccggaaaacggccgccggcccacaggcctaaggtgaccgccgggttgaaatgccccccggaaatatggccgaccgcaaacgccatggttaataccgttaagccaaatgccagcgcgacgccggcaaaaccaatacccagctcggggaaagccgcggcgagcacggcgctaccgcagccgccaaatacaagccagaaggtgccgaagcattcggctgctaattttctgaacataaccacctcaattaaattgtttacgcgcacgagcggaccgtgccggtctttatttatcgtgataagggatgacgataaaaataaagcggcgttattctagagataatcgccatcccggagccagttaaatatattgatattatttgatttagggcaaggtgagtggattccttttgccagtttagcctttcctttatccatggaagattatcaatagtgtagatcataacgcctgaaataaaactattttgtttgatgaataatcaacggccggtaataggcgataagtgagtaattttatgaatatatttaatccgctgaatatgagccacggatgcgattaagcagagtgtcatcttgcctccgccctcgctatactgttgattactgaaggagagtggtggtgtagcggaggggatatgcttcttgagcgcgtagaaatcgtcggttttcgcggtatcaatcgtttgtcgttgatgctggagcaaaataacgtcctgatcggggagaacgcgtgggggaagtccagtctgcttgatgcgctgaccctgcttttgtcgccggagttcgatctttatcactttattcgcgatgatttctggtttcccccgggcgacatccaggggcgcgaacaccatttgcatattatcctgaccttacgcgaaacggagccaggccgccatcgggtccggcgtttccgtccgcttcagcgctgctgggtgccttgcgatgacgggtatcaccgggtgttctatcgcctggagggcgagctcgccgaagatgacagcgtgatgaccctgcggagctttatcgatggtgaaggcgaagcgttggtgctggaggagattgatgagctggcccgacacctggtgcgtttgatgccggtgctgcgcctgcgcgatgcgcgctttatgcgccgcatccataacgggacggtaccgcactcgccgcagatagagatcaccgcccgtcagctggattttctctcccgcgaactggtcagccatccgcaaaatttatcggacggtcagatccgtcaggggctatcggccatggtgcaactgcttgagcattactttgccgagcaaagcagcgctcagacgcggcatcgcctgatgcggcggcgctcccatgatgaacagcgcagttggcgttatctggatattatcaaccggatgatcgacaagcccggcgggcgcagccatcgggtgatcctgctggggctgtttgccaccctcctgcaggcgaaagggacggtgcgcctcgatcgcgacgcgcgaccgctgctgttgattgaagatcccgagacccgtctgcatccgatcatgctttccgtcgcctggcacctgctgaatttgttgccgctgcagcgtgtgaccaccaccaactccggagagctgctgtccctgacgccggtagagcaggtctgccggctggtgcgtgagtcgacgcgggtatcggcgtggcggttggggccgggcggaatgaatgccgaagagagccggcgcattgcttttcacatccgcttcaatcgcgcctcatcgctcttcgcccgctgctggctgctggtggagggagagacggaaacctgggttatcaacgaactggcccggcagtgcggtcatcattttgatgctgaaggggttaaggtgatcgaattcgcccagtccggcctgaagccattgatcaagtttgcccgccggatggggatccagtggcacgtgctggtggacggcgatgaggcggggaaaaaatatgccgcgacggtacgaggtctgcttaataacgatcgcgagctggagcgcgaccatctgaccagtctgccggcgctggatatggaacactttatgtatcgtcagggatttgatgacgtttatcatcgggtggcgcagatcccggataatgtcccgatgaatatgcggcgggtgatcaccaaagccatccatcgctcatccaagccggacctggcgattgaggtggcgatggaggccggccgccgtggcgtggacgctgtgccgacgctgctgaagaaaatgttctcacgggtgctgtggctagcccgcggtcgtgccgattaatctcaccgccgtcgtcatttacggcggcacaaagctctccggcagctaaacaaaacctcattgacgagaaaaatgggtgtcctgttgccaacgggtttcgatagaatcaccgcctggagcggcagggaaacagcaggaatcggaatatgaaagtgaagggaaaacgcaggaccgtctggtggctgttggcgatcgttgtgctggggctggctatctggggatggcggatcctcaatgcgccgctgccgaactaccagacgctggtagttcgcaaaggggatctccagcagagcgtgctggccaccggcaaactggatgccctgcgaaaagttgacgtcggcgcccaggtcagcggacagctgaaaacgctgcacgtcaatattggcgataaggttaaaaaggatcagttgctgggggttatcgatccggagcaggcgcaaaaccagattaaagaggtggaagcgacgctcatggagctgcgcgcccagctcaatcaggcgcgcgcggagagcaaactggcgcaagtgactctggcccgtcagcagcagctggcgcagcgccagctggtctcgcggcaggaccttgataccgcggccaccgatttggcggtgaaacaggcgcagatcggcactattgaagcgcaaataaagcgtaaccaggcgacgctcgatacggcgaagaccaacctcgattacacgcggatcctggcgccgatggccggcgaagtgacgcaaattaccaccctgcagggacagacagtgatcgccgcccagcaggcgcctaacattctgacgctggcggatctcagcaccatgctggttaaagcgcaggtctctgaagcggatgtcatccacctcagaccggggcaaaaagcgtggtttaccgtgctgggcgacccgcttacccgttatgaaggtaaactgaaagacattctgccgacgccggaaaaagtgaatgacgccatcttctattatgcccgcttcgaggtaccgaacccgcaggggatcctgcgcctcgacatgaccgcgcaggtgcacattcagctggctgaggtgaagaacgtgattactatcccgctgagcgccctgggcgacgcggtaggcgataaccgctaccacgttcgactgttgcgcaccggtgaggtcaaagagcgtgaggttatcattggcgcccgcaatgataccgacgtcgcagtggtgcaaggtctggaagagggcgacgaagtgatcgtcggcgagagcgcgagcggggcggcaaaatgacggcgctgcttgagctgcgagatatacgtcgcagctatccttccggcgacggcagcgttgaggtcctgaaggggatcaccctcagcatccatgcgggtgagatggtggcgatcgtcggggcctccggctcgggaaaatcgacgctgatgaatatccttggctgcctcgacaaacccaccagcggcacctatcgggtggcgggaaccgatatcgcgcagctggatggcgatgcgctggcccgtctgcggcgggaacactttggctttatctttcaacgctaccatctgctgtcccatctgaccgccgcgcagaatgtcgaagtgccggcggtgtatgccggcagtgaacggcgcgcgcgcctggcgcgcgctcatgagctgctggtgcggctggggctgggcgagcgcgccgactatcaaccgtcacagttgtctggcggtcagcagcagcgggtcagtatcgcccgcgccctgatgaatggcggggaggtgatcctcgctgatgaaccgaccggcgcgctggacagccattccggcgaagaggtaatggcgatcctgcaccagctaaaagcgcaggggcacacggtcatcattgtgacccacgatccgcaggtcgccgctcaggcggagcggatcgtcgagatccgcgatggcgagatcgtccgcaacccgcccgccagccgccagggcggcggactgcgcgcccgtccgcaggcggagccttcggcgtggcgtcagtttaccagcggctttcgcgaagcgctggtgatggcctggcgagcgatggcggcgaataaaatgcgtaccctgctgaccatgctcggcattattatcggtattgcctcggtggtgtcgatcgtggtggtgggggatgccgccaagcagatggtgctggcggatattcgcgccatcggcaccaataccattgatgtgtatcctggtaaggattttggcgacgacgacccgcgctatcagcaggcgctgaagtatgacgatttgctggcgatccagaagcagccgtgggtgcgctccgccacgccggcggtttcaaaaagcctgcgcctgcgcgccaacaatattgacgttgccgccagtgcggagggggtcggtccacagtattttaatgtctacggcatgacctttagcgaaggcaataccttcaatgaactgcagctcaacagtcgggcacaggtggtagtgctcgacagcaatacccgtcggcagctgtttcccaataaagcgaaagtggtgggagaggtgattctggtgggcaatatgccggccacggtgattggcgttgcggatgaaaaacagtcgatgttcggcagcagcaaaattctccgcgtctggttgccctacaccaccatggcgggaagagtaatgggccagtcgtggctgaactccatcactgtgcgcgttcatgaaggctacgacagtgaaaccgcagagaaacagctgctgcgtctgctggagctgcggcatggtaaaaaagatgtattcacctggaatatggacagcgtcttgaaaaccgccgaaaggaccacacataccttacagctgttcctgacattggtggcggtgattgccctggtggtcggcgggattggcgtaatgaatattatgctggtgtcggtgaccgaacgaacccgggagatcggcatccgcatggcggttggcgcccgggccagcgatgtgctgcagcagtttctcattgaagcggtgctggtttgcctggtcggtggcgcgctgggcgtagcattgtcgctgatgatcgcctttattttacagctgtttctccccggctgggagattggtttttctccgctggcgctgctgacggcgtttctctgttcgacgctgaccggggtgctgtttggttggctgcctgcgcgcaacgcggcgcggctcgatccggtggatgccctggcgcgagaataggcggggcgagaaataaaaatgccagtcagaaggactggcattttattagcaggatgtacacaatgaagcaaaagagttatgcagccgtttccgcttccacagggacgatcacgctggcgtgattgccttttggcccctggtgaacatcaaaccgaacggcttgtccggcttttagcgttctgtaaccatccatctggatggtggagtaatgggcgaaaatgtcttcgccgccgccctcagggcagataaaaccgaaccctttggcattgttgaaccacttaacagtacccatttccatacttcgacatccttcgtaaatctttattagtaagatggaatgaaccggtggtggagtgacgagttgttcaattgctcgccaactctcgccactacaatttagagaaatacgaaaacgcgtcaagcgattgaggagggggaacggcgaaaaatgcgtcaaaatttgaagcagttaacgctattgccggggaatgtgacagccgtcgcggatagaagcgatagatgatagttatctatgatctattgtagatttgtgatgagcataacctctggtcatcgacaggcctccgcctgttggcaacagcaaccgatgatgaacactgacgatgagtaagagagattggctggacttcgagcacctggttgacgacgaagttcgtgatgcgattaaaccgccatctatgtataaagtgatattggtcaatgatgactacactccgatggagtttgttattgacgtgttacaaaaattcttttcttatgatgttgaacgtgcaacgcaactgatgctcacggttcactatgaaggtaaggcgatttgtggcgtgtttaccgcggaagtggcggagaccaaagtcgctatggtgaatcagtacgcgagggagaacgagcatccattgctgtgtacgctggaaaaagcctgaatacaggcatgaaaattgggggaggtgcctatgctcaatcaagaactggaactcagtttaaatatggctttcgccagagcgcgcgagcaccgtcatgagtttatgaccgtcgagcacttgctgctggctctgctaagcaacccctcggcccgtgaggccctggaagcgtgttcagtggacctggtggcattgcgtcaggaacttgaagccttcatcgaacaaaccacacccgttctgccagccacggaagaagagcgcgacacccagccgacgctaagcttccagcgtgtgctgcagcgcgccgtcttccacgtacaatcttctggccgcagcgaagtgaccggcgccaacgtgctggtggcgattttcagcgagcaggagtcgcaggccgcctacctgctgcgtaaacatgaagtgagccgtcttgatgtggtgaacttcatttctcatggtacacgcaaagacgagccgagccagtcttccgataacagcggaagccagcctggcaatgaagagcaagccggcggggaggaacgtatggaaaacttcaccaccaacctcaatcagcttgctcgcgtcggcggcattgatcccctgatcggccgtgaaaaagagctggagcgcgcgattcaggtcctgtgccgtcggcggaaaaataacccgctgctggtgggggaatccggcgtcggtaaaaccgcgatcgccgaaggccttgcctggcgtattgtgcagggcgatgtgccggaagtgatggccgactgcactatctactcgctcgacattggctctttgctggcagggaccaaatatcgtggcgattttgaaaaacgcttcaaagcgttgctcaaacagctggagcaggataccaacagcatcctgtttattgatgaaatccacaccattatcggtgcgggggcggcgtctggcggccaggtcgatgctgctaacctgatcaaaccgctgctttccagcggcaagatccgggtgatcggctccaccacttaccaggagttcagcaacatctttgaaaaagatcgtgcgctggcccgccgtttccagaagatcgatattaccgaaccgtcggtggaagagacggtccagattatcaacggcctgaagccgaagtacgaagcgcaccatgatgtgcgttataccgccaaagcggtgcgtgcggcggtagaactggcggtgaaatacattaacgatcgtcatctgccggataaggcgattgacgtcattgacgaagcgggcgcgcgggcgcgcttaatgccggtcagcaagcgtaagaaaacggttaacgtggcggatatcgaatcagtggtggcgcgcattgcgcggatccctgagaagagcgtctcccgcagcgatcgcgacacgctgaaaaacctgggcgaccgtctgaaaatgctggtctttggacaggataaagccatcgaggcgctgaccgaggctattaaaatggcgcgcgccgggctgggccatgagcacaagccggtgggatcgttcctgttcgccgggccgaccggggtcgggaaaaccgaagtgaccgtccagctggcgaaggcgttgggtattgagctgctgcgctttgacatgtccgaatatatggaacgtcataccgtcagccgtttgatcggggcgcctccaggctacgtcggcttcgatcagggcgggctgctgaccgatgcggtgattaaacatccgcacgcggtattgctgcttgatgagatcgaaaaagcgcatccggacgtgttcaacctgctgctgcaggtgatggataacgggacgctgaccgataataacggccgtaaagcggacttccgcaacgtggtgctggtgatgaccaccaacgccggggtgcgggaaaccgagcgtaaatcgattggccttattcagcaggacaacagtccggatgcgatggatgagatcaaaaagatctttacgccggagttccgtaaccgcctcgacaacatcatctggttcgatcatttgtctaccacggtgatccatcaggttgtcgacaagtttatcgtcgagctgcaggtccagctggaccagaaaggcgtctccctggaagtgagtcaggaagcgcgcgactggctggcgacgaaaggctacgatcgggcgatgggggcacgtccaatgggacgcgtcattcaggacaacctgaaaaaaccgctggcgaacgagctgctgtttggctcgctggtcgacggtggtcaggtcactgtctctctggacagcgacaaaaatacgctgacttacgacttccagagcgcgccgaagcacaaaccggaagcggcccactaaggcgatatcttcaatgtaaaaaaaccggccaggggccggtttttttttgctgacggcagaaatgaaaagaccgggaattatcccggccttcagcatctgacgccttaggggcgaaaacaatcagcgactacggaagacaatgcggcctttgctcaggtcgtacggggtcagctcaacagtcactttgtcgcccgtcagaatgcggatgtagtttttacgcattttaccggagatatgcgcggttaccacgtgaccgttttccagttctacgcggaacatagtgttaggcaacgtttcaagtacggtgccctgcatttcaatattgtcttctttggccatctagtcctctggggtatcactaccgtagttttgaaccggcaagataatgccgaagttcatcatgtaagtaaagttttacgtatctaccctgaatcattcaccttgccgcaaggcgcatagtcagcgcagcggctacggaaatatgacgggtatgaatcgccgaagtagttttggcgcattgcccgggacacacacggccatgccgcgtgacaggcgcaaacgtaaaggggagtgacagaacgatgggcgttatctgactcttattattcccaaacggcggcggggcaacaggcagaagctactctaccgcgcaattataccatcctgacgcaaaatgtgctgaaaacattttattatccgccaggaaatagcacccgcggcacccaaaatcgctcgggcagtcggtagccgcgtaataccgacagatagtccagataatcgcggcggggaatatccactgcgcctaatgacgcggtatggttgttcagtacctgacagtcaattaatttaccgccgctgtgcgcaaagtcctggcaaaataccagcagcgcggttttggaggcattttccgcccggctaaacatcgattcgccgcaaaacagcgctccctgcgctacgccgtacattcctcccaccagggtattctcctgccagacttcaatggagtgggcatgacccagctcatgcagctggtgataggcgcgaacgatactgctggttatccaggtgccttcgtcacgatcgctggcgcagccctcaatcacttcgccaaaggcgtggttgagcgtgacccggtagggcgaacgctgatgaaagcgcttcatgctgcggctgagatggaattgctctggccaaagtaccgcccgggggtcgggcgaccaccagaggatcgggtcgccaggggaaaaccagggaaaaataccacgctgataggccatcagcagccgcgcggggctcagatcgccgccgagcgccagcaggccattaggttctcgcaaggcgccttccggagaggggaaggcgatagagtgccgggagagctgaaccagacgcattttaacctcaatacgcatcagcaaaaattagataatagaatagcctacagacgctgtttaaactggaagtaccggccctgtttagcgagcagctccgcgtgactaccttgctcaattatctggccgttgtccatgactattatctgattaaaacccgccaggccccgcaggcgatgggtcaccatcagcacggttttgtcgcgcatgacatctgccaacagatgcaggatctggctttcggtggccgcatccagaccttctgtcggttcatcgagcagcatcagcggcgcatcgtggagcagcgcgcgggcaatggccagtcggcgcagttcgccgccggagagctgacgcccgccttcgcccagccagccgttaagaccaccatcttgcagcagtttttcgaggcccaccttctcaagggtagcgctgagatgagcgtcatccgcttcaggcgccgccagcagcaggttgtcgcgcagggtggcgctgaacaggtgcacgcgctgcggcactacgctcattgcctgccgcagagtggcttcgctgaggccggagagcggctgattgttgagcagaatctctccctgtgacgggtcccaggcgcgggtaagcaactgcaacagcgtcgattttccgcagccggtccggccaagaatggcgatgtgctctccggcggcaatctgcagggaaatattctccagggcaggggagggctgctgaggatagcggaaggtgacctcccgaagcgttagggccacctgcgctggcggactggcttcatcttcgacaaaggtgacctccggctgctggtcggtaatctgcgagatccgccgcgcggaggccatcacctggcctaaatgctggaaagcgccagtgactggcgccagggcttcaaaagccgccagcgcgcagaatacgaatagcgcgatcagcgccccgggctgactattgccgccgacgccgtctgaggccagccagagcatggccaccacggcgatgccaccgattaacagcattaccgcctgcgaaagcgcggtcagctcggcctggcgccgctgtgcatcctgccagctgagctcggtcttttccatttgtgcgcggtagcggtcgctggcgttaaataccatcagctccgcctgaccctgcagccaggcggtgagctgttggcgatactggccgcgcagctgcgtcatactttcgccggctggcttacctgcgcgatagaacagcggcggcataaccagcagggtcgccagcatgataccgccgagcgtcagcgcgagggtgacgtcgagcagacttaatccgcaggtgacgaccacaatcaccaccagcgcgccgaccagcggcgaaatgacccgcaggtagagatgatccagggtgtcaacgtcggctaccacccggttgagcagctcaccctggcgaaagcgcgccagccccgccggagagagggggagcagtttgctgaaggtgaaaacgcgcaggtgctgcagcacgcgaaaggtagcgtcgtggctgaccaggcgctcaaagtagcgcccggcggtacggataattgccgcgccgcgaacgcccgcggcaggcagcatatagttaaaactgtagatcccggcgacgcccaccaccgctgaggcggagaggaaccagccggagagtgtcagcaggccgatgctggccagcagggtcacaatggccagcacgacgccaagcagcagcatccatttatggcgtttatagagcgccagatagggtaaaagtgcgcgcatttaaatctcctcctgacgatgggccagcagcgccgagaagaccccaccagcacgggccagcgtggcgtagtcgccttgttcgataatctgtccgtcctgcatcacccagacgtcgtcccagtcggccagcccctcaagctgatgggtgaccagcagcgtggtttgctcactggaggcgtgggtcagggcctgcatgactcgctgttcgctatgggcgtcaaggctggcggcaggttcatccagcagcagcaggcggcacggcaccaacagcgcgcgggcgaccgcgatacgctgcgcctggcctaccgacagacgccccgcctgatcgcctacggcggtatggatcccctgcggcagcagggcgataaactcgctgacccaggccttgtccagcgccagcctaagctgtgcttcgctagcttcgggccacgccagcagcacgttttcccgcagcgtggcggcaggcaactgcggattctgtcctacccagctcagcaggcggcgccagcgctcagcgtccagctcgcgcagctctacgccgttgaccatcagcgacccctcatagggcagaaagccgagcagtgtattcagcaaagagcttttcccggatccgctctggccgaccagcaccacgcgagcgccggcgggcagcgcaaaattaagcggccccgccagaactttaccttccggagatttgatcaccaggtcgcgcgcttccacgctaatcagatcgttgtcatttaacgttttctcgccacgctctacctgggtcagcggcgtttccataaacgttttcaggctgtctgcggcgcccacggcctgagctttggcatggtagaaggtacccaggtcacgtaacggctggaaaaattccggggcgaggatcagcgtcaggaatcccgccatcagcgtgacgcccgcgccatagtggccgaagttcagctcgccaaggtaagaaaagccaaaatacaccgctaccagcgcaatggagagggaggtgaaaaactccagaaccccggaggagaggaaggccagacgcaggacttccatggtgcgttggcgaaaatcctgcgaggcgtcgcgaatattatcggtttctgcctgaccgcgatgaaaaatacgcagggtttccatgccgcgcaggcggtcgaggaagtggccgctgaggcgggccagcgcctggaagttacgccggttggcgtcggcggcgcccatcccgaccagcgccatgaaaagcgggatcagcggggcggtgccgagaaggattagcgcggcggcccagttaatcggaaaaatagtaataacgatcagcagcggtacgcaggccgccagcgtcatctggggcaggtagcgggcataatagtcgtgcatgtcgtcgatttgctcaagaataagcgttgcccagctgccggccggtttgccctggatccacgccgggcctgcctgctggaggcggtcaagaacctggcggcgaatttcatagcgaatatgctgcccggcctgaaagccgacccgctcacgcagccagaccacccaggcgcgtagtacaaagatcagcaccagcagcgtgagcggcagcagcagggcggtcgctggaatattctccatcaccatccggtgcaggatccgcgccaggaaccaggcctgcgccacgatcagcagaccgctcgccacgccaagcaggcgggaaatcatcaaccagcgacgggagataatgctttgctgttttaaccagcgggttaactcttgttgacgggttttattcattgcgcgctttgcaggtgtcgttatcggagtattgggcacggcaatgttacatcgcagcaaaaataaaggcgacttttcgtcgccttctttacctttgttactgacttgtaaagattatttgcaagcgtcagccaaaccgtcgaggtaacgctccgcgtccagcgccgccatgcagccggtgcccgcagaagtgatggcctgacgatagatatggtccatgacatcgccggcggcgaacacgcccgggatgctggtctgggtcgcattgccgtggataccggactgcactttgatgtagccgttctccagctccagctggccctcaaagatggcggtgttcgggctgtggccgatggcgacaaataaaccagccacttccagggactcgacattgtcgctgtttttggtatcgcgcaggcgcaggccgctgacgcccatctggtcgccggtcacctcttcgagggtacgatcggtatgcagcacgatgttgccgcttgccactttatccatcaggcgtttgatgaggattttttccgcacggaaggaatcgcgacggtggatcaggtgtacctcagaggcgatattcgacagatacagagcctcttccactgcggtgttgccgccgccgatcaccgccactttctggttgcgatagaagaatccgtcgcaggtagcgcacgcggaaacgccgcggcctttgaaggcttcttcggaaggcaggcccaggtaacgggcggaagcgccggtggcgatgatcagcgcgtcacaggtgtactcgccgctgtcgcctgtcagacggaacgggcggttttgcaaatcgacgcggctgatatggtcgaaaatgatctcggtttcaaattttgcggcatgctcgtgcatgcgctccatcagcagcggaccggtgagatcgttcggatcgcctggccagttttccacttccgtcgtggtggtcagctgaccgcctttttccatcccggtgatcagcaccggctgcaggttggcgcgtgcggcatagaccgccgcggtgtatcccgcaggtccagaaccaaggataagcagtttactgtgtttggctgtgcccatgagatccccataataattggcatacattgggctgggattgtagggaatttgttgtcgtaaaaaaagagcacagcgattttgttaacgatgtgtgcaatagaagctgccaatgaattggtgattttcccggcaaggaatataactatttctactgtcggcgggacaattataagacgaaaaaatgagaatcaaccagggcggatgatgaatatctggcatcttgtactaaaaatcgatgttttgctttgacaatcacctgtgcttttgcgaaaacattcaaggaagaagaaaagcagtatttagcgtgcggcgaattttcatgcacgcaaatgccatttttatccgggttaacgaaatctacgcatggtgtggacagacgccatgcgtgatgtcggtgactgccgtcaggcaacgggcttctcacgtacccctgggttacccaatgtcgtacgggtgataacaggatgggctctggcagtgaaggctcagagccggaacaggagtagggaaggaatacagagagacaataataatggtagatagcaagaagcgccctggcaaagatctcgaccgcattgatcgtaacatcctgaatgaattgcaaaaagatgggcgaatttctaacgtcgagctttctaaacgggtgggactttctccgacgccttgccttgagcgtgtgcgtcgtcttgaaagacagggttttattcagggctatacggcgctgctcaacccgcattatctggatgcatcacttctggtatttgttgagattactctgaatcgtggcgcaccggatgtgtttgagcaatttaacgccgcagtacaaaaacttgaagaaattcaagagtgtcatctggtttccggtgatttcgactatctgttgaaaacccgtgtaccggatatgtcagcgtatcgtaaattactgggcgagaccttgctgcgcctgccgggcgttaacgacacccgtacctacgtggtaatggaagaagtcaagcaaagtaatcgtctggttattaagacgcgctaacacggaacaggtgcaaactcgacgtagtttgattacactcctgttaatccatacagcaacagtgccggggagacccggcgctgttgtccgttttagcagcaggcaggaaacagcctgatacctggagagcctttcttgagccaggaatacaccgaagacaaagaagtcaaactaaccaaactcagcagcgggcgccgactccttgaggcgatgctcatcctttgctccctcttcgccatctggctgatggcggcactactgagctttaacccctcggaccccagctggtcgcaaacggcatggcatgagcctattcataatttaggcggcgcccccggtgcgtggcttgccgataccctctttttcatttttggcgtcatggcctacaccatcccggtgatcatcatcggcggatgctggtttgcctggcggcatcaggaaaacgacgaatacattgattattttgccgtttcccttcgcctcatcggtgcgttagccctgatcctgacctcctgtggtctggcggcgattaacgccgatgatatctggtacttcgcctccggcggggtgatcggcagcctgctgagcaccacgctgcaacccctgctgcacagcagcggcggcaccatcgccctgttgtgtatctgggcggccgggctgacgctgttcaccggctggtcgtgggtcagcattgcggaaaagctgggcggcggcatcctgtccgttctcacctttgccagcaaccgtacccgtcgggatgatacctgggtcgatgaaggcgaatacgaagacgacgaggaagagtacgacgacgaagaggcggccaggccgcaggaatcgcgtcgcgcccgtatcttacgcagcgcgctggcgcggcgtaagcgtctggccgagaagtttaccaaccctatggggcgtaaaaccgacgctgcgcttttctccggcaaacggatggatgacggcgaagaggtggtgcaatacagcgccagcggggcgcctgttgccgccgacgatgtactgttttccggcgccagcgccgcgcgtcccgcagaggatgatgtgctgttctccggcgccagcgccgtgcgcccgggcgatttcgacccttacgatccgttgttgaatggccacagtatcgctgagccggtaagcgcagcggcggcggctactgccgcgccgcaggcgtgggcagaatcaccggtgggccatcacggcgctgcgccagcttatcagccggaagccagctatccgccgcagcaggcctatcagcctgaacccgctccgttccagcaggctgcttatcagccgccagcggggcaaaccgcaccgcaggcgtatcagcctgagccagcgccgtatcaacagccggtttacgatccgcgtgccggtcaacctgcgccgcaggcctatcagcctgagccagcgccgtatcaacagccggtttacgatccgcgtgccggtcaacctgcgccgcaggcctatcagcctgagccagcgccgtatcagcagccggcttacgatccgtatgccggtcaacctgcgccgcaggcctatcagcctgagccagcgccgtatcagcagccggcttacgatccgcatgccggtcaacctgcgccgcaggcctatcagccggagccagcgccgtatcagcagccggcttacgatccctatgccggtcagcctgcgcctcagacctatcagcagccggcttacgatccgaatgccggtcagctcgcgccgcagacctatcagcagccggcttacgatccgaatgccggccagcccgcgccgcagccgtatcagccggagccagcggcgtatcagccgcaaagcgcgccagttcccccaccggagccagagcccgaggtcgtgcaggaggaagtgaaacgtccgccgctctattatttcgaggaagtggaagagaagcgggcgcgcgaacgcgagctgttggcctcctggtatcagccaattcctgagccggaaagtccgattgccactaaaccgctgacgccgccgaccactgcgtccaaaccgccagtggagacaaccgtagtctctgcggtagcggctggggtgcatcaggctaccgccgccagcggcggcgcggcggcagcaacctcgtccactgccgcatccgctgcggctacgccattgttcagcccggcgtccagcggcccacgggttcaggtgaaagagggcatcggtccaaaactaccgcggcccaatcgcgtgcgtgttcctacgcgtcgggaactggcctcctacggcatcaagctaccgtcgcagcgggaggcggaacagcgcgcgcggcaggcggagcgcgatccgcattatgatgatgagctgctctcggatgaggaagcggatgctatggagcaggatgaactggctcgccagttcgccgccacccagcagcagcgctacggtcatcgctgggaagacgataacgcgactgatgacgatgaggccgacgccgccgcggaagcggagctggcgcgtcagtttgccgctacccagcagcagcggtacgctaccgagcagccgccgggcgccaacccgttctcgccggcagattatgaattctcgccgatgaaaacgttggtcaatgacggcccgagcgaaccgctgtttacgccgacgccggaagtccagccgcagcagccggcccagcgctatcaacaaccggcggccgctccgcagcagggttatcaacctgcgcagcatcagccgatacaccatcagcctgtgccgccgcagccgcagtcctatccgactgcgtcgcagcccgtgcagccgcaacaaccggttgcccctcaggggcatcagcctgccgcccctgcgccgcaggagagcctgatccacccgctgctgatgcgcaatggcgatagtcgaccgctgcaaaagccgaccacgccactgccgtcgctggatctgcttaccccgccgccgagtgaagtcgagccggtggatacctttgctctcgagcagatggcacgcctggtggaagcgcgactcgccgatttccgcattaaagcggatgtggtgaactactcaccggggccggtgatcacccgcttcgaactgaatctggcgcctggcgttaaggccgcacggatctctaacctgtcacgggacctggcgcgatcgctgtcaacggtcgccgtgcgcgtggtggaggtgatcccgggcaaaccgtatgtcgggcttgagctgccgaataaaaaacgccagaccgtctacctgcgtgaagtgctcgacaacgccaagttccgtgataacccatctccgctcaccgtggtgttgggtaaagacatcgctggcgatccggtagtagccgatctggcgaaaatgccgcatctgctggtggccggtaccaccggttccggtaagtctgttggcgtcaacgccatgatcctcagcatgctctacaaggcgcagccggaagatgtgcgtttcattatgatcgacccgaaaatgctcgagctgtcggtctacgaaggaattccgcacctgctgacggaagtagtcaccgacatgaaagacgccgccaatgcgctgcgctggagcgtcaatgagatggagcgccgctacaagctgatgtcggcgctgggcgtgcgtaacctcgcgggctacaacgagaagatcgccgaagccgcgcgcatgggacgtccgatcccggatccgtactggaagcctggcgacagcatggacgccgtacatccggtgctggaaaaactgccgtacatcgtggtgctggtggatgaattcgccgatctgatgatgaccgtcggcaaaaaggtggaagagctgatcgctcgcctggcgcagaaagcgcgcgcggcggggatccacctggtgctggcgacacagcgtccgtcggtagatgttattaccggcctgattaaggccaacatcccgacgcgcatcgcctttaccgtgtcgagtaaaattgactcacgtaccattctcgatcagggcggcgcggaatcgctgctgggtatgggggatatgctttactccgggccgaactctaccacgccggtgcgtgtccacggggcgtttgtgcgcgaccaggaagtccacgccgtggttcaggactggaaagcccgcggtcgcccgcaatatgtggatggcattacctccgacagcgaaagcgaaggcggcggtggcggcttcgacggcggggaagagctggatccgttgttcgatcaggcagtcaactttgtgaccgagaagcgcaaagcgtcgatttccggggttcagcgtcagttccgcatcggctataaccgtgccgcgcgtattatcgaacagatggaagcgcagggtatcgtcagcgagcagggccataacggtaaccgcgaagtgctggcgccgccgccctttgaatgagtgcaaagttgggtaaataagcgcaaaatcagccaattcttctgtcccgccgccgccggcggtcctacagtaggggcagaagaggctcccgcgtcgggagtgacgcacattaaggaagaacaatgaaaaaactcgcaatcacctgtgcattactgtctggtatggtcgtcagccaggtctgggcagatgcggccagcgacttaaaaagccgtcttgataaagtgagcagcttccatgccagcttcacgcaaaaagtcaccgacggcagcggtaacgccgtgcaggacgggcagggagacctgtgggtgaaacgcccgaacctgtttaactggcatatgacccagccggatgagagcgtcctcgtttcggatggtaaaacgctgtggttctataacccgttcgtcgagcaggccacggcgacctggctgaaagacgctaccagcaacacgccgtttatgctgattgcccgcaaccagtccagcgactggcagcaatataatatcaagcaaaatggcgatgattttgtgctgacgccaaaaagcggcagcggcaacctcaagcagttcacgatcaacgtcggtcgggacggcactatccatcagttcagcgccgtcgagcaggatgatcagcgcagcagctatcagctgaaatcgcagcagaacggcgccgtcgacgcagctaagttcacctttacgccgccgaaaggggtgacggtggacgatcaacgtaagtagaggcgaaagtgagcaatctgtcgctcgatttttccgacaacgcgtttcaacctctggccgctcgcatgcggccagaaaatttagcgcagtatattggccagcagcacctgctggcgccgggtaaacccctgccgcgggccattgaggccgggcacctgcattcgatgatcctctgggggccgccgggtaccggcaagaccactctggcggaagtgattgcccgctacgccagcgccgatgtcgaacggatctcagcggtaacctccggggtgaaagagattcgcgaggctattgagcgcgcgcggcaaaatcgcaacgccggccggcggaccatcctgtttgttgacgaagtgcatcgctttaataaaagccagcaggatgcctttctgccgcatattgaagacggcaccattacttttattggcgcgaccaccgaaaacccctcctttgagcttaactcggcgctgctctcccgcgctcgcgtctacttactgaaatcgctcaccaccgacgatatcgagcgggtgcttgaccaggcgatgaacgataaaacccgcggctacggcggccaggatatcattttgccggatgagacccgcagggccattgccgagctagtgaacggcgacgcgcggcgagcgctgaataccctggaaatgatggccgatatggccgaaagcgatgactcgggcaagcgggtgctgaaggcggaactgctgaccgagatcgccggcgagcgtagcgcgcgctttgataataaaggcgaccggttctacgatttgatttctgctctgcataagtcggtgcgcggaagcgcgccggatgcggcactttactggtacgcgcggatcatcaccgccggcggcgatccgctgtacgttgcccgccgctgtctggcgattgcctcggaagatgtcggcaacgccgacccgcgggcgatgcaggtcgctatttcggcgtgggattgctttacccgcgtcgggccggcggaaggcgaacgggcgattgcccaggccatcgtctatctggcctgcgcgccgaagagcaacgcggtgtacaccgccttcaaagcggcgctggccgacgcgcgggatcgtcctgactacgacgttccggttcatctgcgcaatgcgccgacgaagctgatgaaagagatgggctacggccaggagtatcgttacgctcatgacgaacccaacgcctacgccgccggcgagcagtacttcccgcaggaaatggcgcaaacgcgctattatcacccgacaaaccgggggcttgagggcaaaattggcgaaaagctcgcctggctcgctgaacaggatcaaaatagcccgataaaacgctaccgctaattgaggcgttgcggtaaggttattacactatttccgtggtcgtagtctgcggccacttttcttttttaattcgataagcacaggataagcatgctcgatcccaatctgctgcgtaccgagccagacgcagtcgcagaaaaactggcacgccggggctttaagctggatgtagataaacttcgcgcgcttgaagagcgtcgtaaagttctgcaggtgcaaacggaaaacctgcaggcggagcgtaactcccgatcgaaatccattggccaggcgaaagcgcgcggggaagacatcgagccattacgcctggaagttaacaagcttggcgaacaactggatgctgcaaaatccgagctggaaacgctgctggcggaaattcgcgatatcgcgctggcgatcccgaatattcctcatgatgatgtgccggttggtcgcgatgaaaacgacaacgttgaagttagccgctggggtacgccgcgtcagttcgattttgaggtgcgcgatcatgtgacgctgggtgaaatgcacggggggctggattttgccgccgccgttaagctcaccggctcgcgcttcgtggtgatgaaagggcagctggcccgtctgcaccgcgccctggcgcagttcatgctggatctgcacaccgaacagcatggctacagcgaaaactatgtcccgtacctggtaaaccaggacaccctgtatggcactggccagctgccgaaattcgccggcgacctgttccatacccgtccgctggaagaagaggctgacagcagcaactacgcgctgatcccgacggcggaagtgccgctgaccaacctggtgcgcgatgaaatcatcgacgaagacgatctgccgatcaaaatgaccgcccatacgccgtgcttccgctctgaagccggttcctatggccgcgacacccgcggtctgatccgtatgcaccagttcgataaagttgaaatggtgcagatcgtccgcccggaagactctatggccgcgctggaagagatgaccggtcacgccgagaaagtgctgcagctgctgggcctgccgtaccgtaaggtcgcgctgtgcaccggcgatatgggcttcagcgcctgcaaaacctatgacctcgaagtatgggttccggcgcaaaacacttatcgtgagatctcctcctgctccaacgtctgggatttccaggcgcgtcgtatgcaggctcgctgccgcagcaagtccgataagaagacccgtctcgttcataccctgaatggttctggcctggcagtaggtcgtacgctggtggcgctgatggaaaactatcagcaggctgatggccgtatcgagatcccggaagtgctgcgcccgtatatgcgcggcctcgaatatatcggctaaacttctcactccttcttttaaaagcgcctgcgggcgctttttttacgcccttattgataccgggcaataatccttttcgcgaatgcagtgatactccctttggattaaaccagcataaaaaaccaataatatcgcaaagcattatatatatgtctatataacgcttgtcagtttattgtgagcaaccaaagcgagtatccatgaaaattaaagcccctgatgctttactggctgctgaggtaagccgccgtggtctgatgaaaaccacggcaataggcggcctggcgctggccagcaacgcactaacgttaccttttacccgactgtcgcatgctgccgatacgccggcgcccgccagtgagaaggtggtctggagcgcctgcaccgtcaactgcggtagccgttgcccgctgcgcatgcacgtggtggatggcgcgattaaatacgtcgaaaccgataataccggtgatgataactatgacggtttgcaccaggtccgcgcctgcctgcgtgggcgttcaatgcgccgccgggtctataatccggaccgtctgaagtacccgatgaagcgcgttggtaaacgcggtgagggcaagttcgagcaaatcagctgggaagaggcgttggataccatcgccagcaatatgcagcggctgattaaagagtacggcaacgaatccatctatctgaactacggcaccggcacgctcggcgggacgctgacccgctcctggccgccggggaaaacgctgattgcccgtctgatgaactgctgcggtggctatctcaaccattatggcgactattcatcagcgcagattgctgccggtctgaattacacctacggcggctgggcggacggcaacagcccatcggatattgaaaacagtcagctggtggtgctgttcggcaataaccccggcgaaacgcggatgagcggcggcggggtgacgtactaccttgaacaggcgcggcagaaatccaatgcccggatgataatcatcgatccgcgctataccgacaccggcgccgggcgtgaagatgaatggatcccgattcgtcctgggaccgatgcggcactggtttcgggcctcgcgtgggtgatgatcaccgagaatctggtcgaccagcctttcctcgataaatactgcgtgggatacgacgagaaaacgctgcccgccggtgcgccagccaatggtcattacaaagcttacattcttggccagggcattgacggtatcgccaaaacgccggagtgggcctcgacaattaccggtattccgcgcgaacgcattgttaaactggcgcgcgaaattgccaccgccaaaccggcctatattagccagggctggggtccgcagcgtcacgccaacggagagatcgccacccgcgccatctcaatgctcgccattctgacgggtaacgtcgggatcaacggcggcaatagcggggcgcgcgagggctcgtatagtctgccttttgagcgtatgccgacgctggagaatccggttgagaccagtatctcgatgtttatgtggaccgatgcgattgagcgcggcccggaaatgaccgctctgcgcgacggcgtacgcggtaaagataagctcgacgtgccgatcaaaatgatctggaactatgcgggcaactgtctgattaaccagcattctgagatcaaccggacccacgaaatcctgcaggacgacaagaaatgcgagatgattgtggtcattgactgccatatgacctcctcggcgaaatacgctgatattctgctgccggactgtaccgcctccgagcagatggatttcgcgctggatgcctcctgcggcaacatgtcctacgttatctttgccgatcaggccatcaagccgcgctttgaatgcaaaaccatctatgagatgaccagcgaactggcaaagcgtctgggcgtcgaagagcagtttaccgagggccgtacccaggaaggctggatgcgctatctgtatgagcagtcgcgcaaagcgattcccgacctgccggatttcgacaccttccgtcagcagggcatctataagcagcgcgatccgcaaggtcatcatgtggcctacaaagccttccgtgaggatccgcaggctaatccgctgacaacgccttcgggcaagatcgaaatttactcgcaggatctggcgaaaatcgcggccacctgggagttgccggaaggggatgttatcgatccgctgccgatctacaccccgggtttcgaaaactacaacgatccgctgacagcgaaatacccgctacagctcaccggcttccactataaatctcgcgtccactcgacctacggcaacgtcgatgtgctgaaggccgcctgtcggcaggagatgtggattaacccgatcgacgcccgcaagcgcggcattgccaacggcgatcgtattcgcatcttcaacgatcggggtgaagtgcatatcgaagcgaaggtgacgccgcgcatgatgccgggcgtcgtcgcgctgggggaaggggcctggtacaacccggacgcctcgcgtgtggatcaggcgggcagcatcaacgtgctgaccacccagcgtccgtcgccgctggcgaagggaaacccgtcgcataccaaccttgttcaggttgagaagctgtaaggagtaaccgatgacaactcagtatggattttttattgattccgcccgttgcaccggttgcaaaacctgcgaactggcctgtaaggactacaagaacctgaccccggaggtcagcttccgccgcatctatgaatatgccggcggcgactggcaggaggacaacggcgtctggcagcagaacgtgtttgcctattacctctcaatcgcctgtaaccactgtgaagatccggcctgcaccaaggtctgtccgagcggcgcgatgcataagcgcgaagacggttttgtggtggtcaacgaagaggtatgcattggctgccgctactgccatatggcctgcccgtacggcgccccacagtacaacgccgacaaaggccatatgaccaagtgcgatggctgtcacgagcgcgtcgccgaggggaaaaagccgatctgcgtcgagtcctgcccgctgcgggcgttggatttcgggccgattgccgaactgcgcgctaagcacggccagctggccgcggtagcgccgctgccgtcggcgcactttacccggccgagtatcgttatcaaacctaacgccaatgcccggccgtgtggcgataccaccggttacctggcgaacccgaaggaggtgtgagatgggaaacggatggcatgaatggccgctgatggtctttacggtcttcggccagtgcgtcgtaggcggctttattgttctggcgctggcgctgatgacaggcaagctttcccgtgagcaggagcagcgcgtggtgggcagcatgttcggcctgtgggtattgatggggatcgggtttattgcctcgacgatgcaccttggctcgccgctgcgggcctttaattcgctgaatcgcgtgggagcctcgtcgctgagtaatgaaatcgccagcggggcgatcttcttcgccgtcggcggaattggctggctgctggccgtgtgcaaaaagctgcctgccggcctgcggagcctgtggctggtggtgaccatggtgctgggcgtgattttcgtgtggatgatggtgcgggtatacaacaccatcgacacggtgccgacctggtacaccgtttggacgccgctgagcttcttcctgacgctgtttatcggcggtccactgctgggctacctgctgctgcgcgtcgcaggcgtcgatggttgggcgctgcgcctgctgccggtggttagtttgctggcgctgctggtcagtattatggtggtcgtgatgcagggaagtgaacttgccaccatccgcagctcagttcagcaggcctccgccctggtgccggattacgggttgcttatggcctggcgcgtggtgctgctggccctggccctggcctgctggtgcgtgccgcagattcgcggccgcaaaccggcggtctcgctgctcggcctggcctttgttctgatactggcgggagagatgatcggccgcggcgtattctatggcctgcatatgaccgttgggatggctgtcgccagttaactacctccatcatgccggtgcctaaccaccggcatgatgaaaacgtgctgtcgatagatgaaatttttcaactgaaattaacttcggcatttattaataaaccagcaaaaacaatagcgtattatctgttgtctcacctttttccatcctctggataaaaaacttctatcgtagccgacaaaaccgcgtcacgcctgatttcaggtggattgacaatgtttttagcagtggcatgatgcgctcgcgatctgaacattcctcacggtttttacccatgaccatctacacccggccagtgcaaatgctgctctgtggcctgcttttattgaccctggcgatagcggtgctgaatacgctcgtcccgctctggctcgcccatgaaaacatgccaacctggcaggtcggcatggtggggtcatcctattttaccggcaacctggcaggtacgttgctggccggctgggtgatcaagcgcctggggtttaaccgtagctattatctcgcatcgttaattttcgccgtcggctgcgtagggctggggatcaccgttggcttctggacatggctgagctggcgttttatcgccggcgtaggttgcgcgatgatctgggtggtggtggaaagcgcgctggtttgcagcggcacttcccgcagtcgcggtcgtctgctggcggcgtacatgatggtctattacgtcggtaccgtactgggccagctgatggtcagtaaattacccaccgatttaatgagcgtcctgccgtgggtgaccggcctggcgctggcggcgatcctgccgttgctgtttacccgcattatggggcaggcagaagagccgcatgaaacggtacgtatctggccgatgctgaagctacgccaggcgcgccacggggtcaatggctgtattatttcggggattgtcctcggctcgctgtatggcctgatgccgctgtggctgaaccatcagggcgtcagcgactccggcatcggcttctggatggcggtgatggtgagtgcggggatcctcggccagtggccggtagggcgcctggcagaccgctacggtcgcctgctggtgctgcgggtacaggtctttgtggtcattctgggatgtctggcgatgcttagtcaggcggcaatggccccggcgctgtttgtgcttggggcatctggtttcacgctgtatccggtggcgatggcctgggcctgtgaaaaagtggagcaccatcagctggtggcgatgaatcaggcgctgctgatgagctataccatcggcagcctgctgggcccgaccctgacggcgatgctgatgcagaacttctcagacaacctgctgtttatcatgatcgccagcgtgtcgtttatctatctgctgaccctgctgcgcaaagccgggcatcatccgacgccggtggcgcacgcctgaccctgcaacgcgcagcgcatgctgcgcgtcatctgctgcaatcgcataggcttactgctgcagagaggacaagtcgtttttcatgagaatgaaacggcggggcggacacagcttcccacgccgttgcaggccggcataagcgcatcaccggcccgggcgggattagtacattactttgtgaccatactgctcaaggatgccttttacccgctccatggtctctttcttcggcggatggacgccgtccagcttgtactcttcgcccatcgctacccatttgtgtttacccagctcatggtagggcagcagctcgattttttcgacattgcccatatcgcgggtaaattcgcccaggcggtgcgcggaatcatcatcgtctgaccagccgggaaccaccacgtagcggatccagacattgatattcttcttcgccagatactgggcgaattccagcgtacgatggttagagacgccgaccaggttctggtgaatctcatcgttcatctgcttgagatccagcatcaccaggtctgttacctccagcagctcgtcgataaccggatcgtagcgacgtacgaagccgttggtatccaggcaggtgtggatgccttctttcttacacgcgcggaaccagtcgcgaacaaactccgcctgcaggatcgcctcaccgcccgaggcggtgacgccgccgccggaagcattcataaagtgacgataggtcaccacctctttcattaattcttcaacggtgatttctttgccgccgtgggtatcccaggtgtcacggttatggcagtacaggcagcgcatcaggcagccctggaaaaaggtaataaagcggatgcccgggccatcaacggtaccacaggattcaaaggagtgaatgcgaccaataactgacattgcggtgttttctccagatgtggcccatccggggccgtgttggtgcgcagctcagcggctgcgtcgagtctgttttgacaggtacccaaagtatagataactggcaaagcaggctggggtggggaatgcttgttaaaaaggccccactgatgtggggcctttattgtacgccttttcagtcagacagggaattacatggtctgagtgaaggtacgggtaataacatcctgctgctgttctttggtcagggagttaaaacgtacggcgtagccagatacgcggatggtcagctgcggatatttttccgggttttccatcgcgtcgagcagcatttcgcggttcatgacgttcacgttcaggtgctgaccaccttcgatggacgcttcgtgatggaagtaaccatccatcagacctgccaggttggtcttacgaacttcgtcgtctttacccagcgcgttcggcacgatagagaaggtataagagataccatctttcgcgtaagcaaacggcagtttagcgacggaggtcagagaggctactgcacctttctggtcacggccgtgcatcgggttagcacctggaccgaacggcgcgccagcgcgacgaccgtctggggtattaccggttttcttaccgtacaccacgttagaggtgatggtcagaacagactgagtcgggatagcgttgcggtaggtgtgcagtttctgaattttcttcatgaaacgttcaaccaggtcaacggccatgtcatcgacgcgagggtcgttgttaccaaactgcgggtattcgccttcgatttcgaagtcgatagccagaccgtcttcgtcacgaatcggtttaactttcgcatatttgatagcagacagggagtcagcagcaacggacagaccagcgataccacacgccatggtgcggataacgtcacggtcgtgcagcgccatcagagaggcttcgtagctgtacttgtcgtgcatgtagtggatgatgttcagcgcggtgacgtactgtttagccagccagtccatgaagtgatccatgcgatccattacttcgtcgaagttcaggacgtcgcctttgatcggttcagatttcggaccaacctgcattttcagtttttcatccacgccgccgttgatagcgtacagcatggttttcgcgaggttagcgcgagcgccgaagaactgcatttgcttaccaacaaccatcgggcttacgcagcatgcgatagcgtagtcgtcgttgttgaagtccggacgcatcaggtcatcgttctcatactgcagagaagaggtatcgatggacactttagcggcgaatttcttgaagctcagcggcagtttttcagaccacaggatagtaatgttcggctccggagacggccccatggtatacagggtgttcaggaagcggaagctgtttttggtcaccagagtacggccgtcaacgcccataccgccgatggattccgttgcccaaatcgggtcgccggagaacagttcatcatattccggggtacgcaggaagcgaaccatacgcagtttcatgaccaggtggtcaaccatttcctgcgcgtcttgctcggtgattttacccgcctgcaggtcacgctcgatgtagatatccaggaagctggaggtacgaccgaaggacattgccgcgccgttctgagatttcacggcagccaggtaaccgaagtaggtccactgaatcgcttcctgagcggtggtcgccggaccggagatgtcatagccatatttagccgccatctctttgatctggcccagtgcgcggtgttgttcagcgatttcttcacgcagacggatggtcgcttccaggtcttcgccgctttccagtttcgcttgcagagagttgaactgggcgaatttgtctttcatcaggaagtcgataccgtacagcgcaacgcgacggtagtcaccgatgatacgaccacgaccgtaagcatccggcagacccgtcagcacgccggatttacggcagcgcaggatgtccggggtatagacgtcgaaaacgccctggttgtgagttttacggtactctgtgaagatttttttcagcatcgggtccagctcgcgattatacgctttgcaggaaccttcaaccattttgataccaccgaacgggatgatcgcacgtttcagcggcgcttcggtctgcagaccaacgattttttccagacctttctcgatatagcccgcgtcgtgagaggtgatggtggaagccagggcagtgtcaaaatcaacaggcgcgtgagtgcggttttcctgttttacaccttccattacggtgtcccacagcttggtggtcgcttcagtcgcgccagccaggaaggattcgtcgccttcatatggggtgtagtttttctgaataaagtcacggacgttgacttcattctgccagtcacctttcgcaaaaccttcccaggctgtggctaacttttcattaagctcggacatgtaacacctaccttcttaagtggattttttatttactgcctgaaacaacccttagtgatggtcgttgccacgcaggtaaatgacccagtatgtcaacccgaccagcagacccccgccgataatgttcccgatagttaccggaatcaggttatcagtgatgaagttcataacggtcaagtgagagaaactttccggagtcgaaccgatggcggtccagaattccgggcttgcaaagttgcggattacgatacccatcgggatcataaacatgttggcgatgctgtgctcaaagccgctggcaacgaacatcgctaccggcaggaccatgatcatcgctttatccatcaggctacgaccggaatagctcatccatacggcgagacaaaccatcaggttagcgaggatacccaggctcacggcctccacaaaagtatgatgcattttgtggtcggcggtctgcagaacgtttagcccccagccgccgttggcagtcatatattcgcctgataaccacatcagcagcacaaacagcagcgcgcccaccaggttaccaaaatagacgttgagccagttttttgccagttgcccccaggtaattcgaccgctggctttggccaccacgatcagtaccgtagaggtaaagaggtcagcgccgcagataacgcacagaatcagacccagagaaaaacagatcccaccgataagtttggcaatcccataaggcatcgcggcagtgccggtggtcgcggtgatatagaatacgaaagcgatggagatgaaaacgccagcggtgatcgccagataaaacgtcttcatcggatgcttcgttgctttatagacacctgcttcttcggcgactttcgccatcgcggcagggagcaaaagatcaaaagggttgtcagctttcacactaactctctctttatataagttggcggtgagatactaacaaagcattatagaagggaaattgatatagatcatatctcaccggaactatatgcctttttagtgtgtggtttttattgaaattatcagtaagctcatgaaatgtatagagaaaataatttttaaattttataaataatgttgaattttttcttttttaccccatttttgagttaattaaaatggagtatttttattaaatttaacaattgataaatgatgaaatggcgttatttaacattaattaactttacaactacaaattataggaggcgctttcttagggttaaataacggagccgctgagggctccgttgtaagcatgaacgatggcgcaagctgggcttattttgcccaaaacgccgctttcgcccgctgcagtttttcataggctttcagcagcgactgatgggccgggaaggcctgcagatcgctatcgaccgcctggagaccatagaacggcgcttccccgctcagcgccgcgctggcggcttcgaccgcgtctgcgccgtacatacggatgaaggcgttcaggtactgcagtggctgacgctcttcttcctggctcagcagcagcagggtttgcagacagcgatagtagttcgcgcgctccgcgctgaagaccgaagcattaaattccatggtccactcggtccagatcagcgcctgttccagatcgccgccggccagggccagcatcgctttcagctcgccgacgcgcagggtataccagccgttgtcttttccggtggcgagccccagcagttcgcgaacgcgggtgaaatcatccagaccctcatcgtccatctgctcgatcagcgccaggtaatcttctttatcccactcgctgcccggcagggacagaatggtgtcccgcagatgagcgcccatgctgttgttcgccagccacaggtcttccgccgggtatatgtccgacatccccgggacgatgatacggcaggcgtaaacgcccaggtgctcgtagtcggcgatgtacacttctttatcttcggccttgaagatggccatcagggtggcgaactcttcttcggtagtaccagagaagctccagtcaacgaatggatagtcggcgtcctgcttgaacatatcccaggagatcaggccgctggagtcgataaagtgggtttcgaggttcgcgtgctcggcgacctcttcgtcatcgaaggttggcggcgtgaagacgtcgaggtctttcaggctgcggccctgcagcagttcggtgacggttcgctccagcgccacgccaaagtccgggtgggcgccgaaggaggcgaagcaggtgccgttagccgggttaaacagcacgacgcagataaccggatatttgccgccgagcgagccatcataggcaaagatcgggaaaccttcagcttccagtttggcgatcgactccacgacgcccggatagcgcgccatgacttccgccgggatctccggcaggctgatgctttcagcgatgatgcggtttttaatgtgacgttcaaagacctctgacagaccctgtacccgcgcttcgttgcgggtgttaccggcggacatgccgttggagacgtacaggttgccgacaatattcatcggaatatagacggtttcgccgtcggactggcgggtaaaaggcagaccgcacacgccgcgctcatcgttacccgactgcagatccaccagcatactggccgttaactgatcgtcaggatcgtagaacgcgcgcaggcgggcatccagcagaccttccgggacttcatcatcctcagtcagcgggaaccacttttcgttcgggtagtgaacaaacgggccgttagcgattgtgtcgcctaaccagaagtcggcgaagaaatagttagtggacagacgttcgaaatattcgcccagcgcggaggccagggctgcctttttggtggcgcctttaccattggtaaagcacagcgcgcacgctttatcgcgaatgtgaacggaccacacgtgcggcaccgggttcagccacgaggcctcttcgatatcaaatccgaggtcgagcaatttctgctggaagcgagcgatggaatcttccagggcggcatctttgccgggaataaacgtttgggtcatggcgatcacttttgtcgtacggaaagcgcgcaatgatacggcttttatctgacaggtgctatctccatcatctggctatgcttagaggcatctttaatacacagggagatggaaaatgaaagcctttgactggcagcggatggcgctcgataaagtaccggtggaattcctggcggaggtggcgttgcgcagcctctataccttcgttctggtctttattttcctcaagattaccggacggcgcggcgtgcggcagatgtcgctgttcgaggtgctgattattttgaccctcggctcggcggcgggtgacgtggcgttttatgacgatgtgccgctgctgccggtgctggtggtcttcgttacgctggcgctactgtatcgcggcattatgtggctgatggggcatagcgaaaagctggaggatctactggaggggaaacctatcgtagtggtggaagaggggcagttggcctgggagaagctgcatgcggaaaacatgaccgaattcgaattttttatggagctgcgggtcaacagcgtcgagcagcttggccaggtccggctggcaatcctcgaaaccaacgggcagatcagcgtgttttattatcccgatgaagaggtgagggccggattatcgatccttccagcgcattgtaccacacgctataccaccattccgcaagaggggatctatgcctgcgtgcgctgcagcatcgtaatggcgatgcaggcgggagaaaaacgaatatgtccgcgctgcgcaaatgcagaatggtcgaaggccagccgggcgaaacggcttacctgacagcaaatatgtcggttttattacatcaagccgatagattctgttgtgtgacggcggccgcgttttaccgtcggcgagttttagccattgcggaccgtgtcactgaatgataaaaccgatagccacaggaataacttatgcccgcggcggttcgcgggcaaaacaacatagcaacgtggtgaggggaaatggctcaggtctataacttcagttcgggcccggcaatgctgccggcggaagtactcaaactggcgcagcaggaactgtgcgactggcacggtctggggacgtcggtcatggagatcagtcaccgtggtaaggagtttatccaggtggcagaagaggcagaacaggacttccgcgctctgctgaacatcccttccaactataaagttttattctgccacggcggcggccgcggccagttcgccgggatcccgctgaacatcctcggcgataaaaaggtcgctgactatgtggacgccggttactgggcggccagcgcggtcaaagaggcgaagaaatactgcacgccgaacgttatcgacgcgaaaatcaccgtcgacggcaagcgcgctgtgaagccgatgagcgagtggcagctgaccccgggagcggcctatctgcactactgcccgaacgaaaccattgatggtatcgcgattgatgagacgccgaacttcggcgacgacgtcatcgtgaccgccgatttctcctccaccattctttcccgcgaaattgacgtcaaccgcttcggcgtaatctacgccggcgcgcagaagaatatcggtccggctgggctgacgctggtcatcgtgcgtgaagatctgctgggcaaagccagcgtggcctgcccatcaattcttgactacaccgtgttaagcgagaatgactcgatgtttaacacaccgccgacgttcgcatggtatctggctggactggtgtttaagtggctgaaacagcagggcggggttgccgcgatggataaaatcaaccagcagaaagccgaactgctctacggcgtgatcgataacagcggcttctatcgtaacgatgtggcgcaggccaaccgttcgcgtatgaacgtaccgttccagctggcggacagcgccctggacaaactgttcctcgaagagtcgtttgctgccgggctgcacgcgctgaagggccaccgggtggtgggcggcatgcgtgcttccatctacaacgccatgccgctggacggcgtgaaggcgttaaccgactttatgctggacttcgaacgccgccacggttaatcgcctgtttctttcttcctccccgcggcctgtctgcggggtttttattctgtttgtttgagagtgaagtttgatggaatccctgacgttacaacccatcgcacgcgtagagggcaccgtgaacctgccaggttcgaaaagcgtctccaaccgcgcgctgctgctggctgccctggcccgcggcacgacggtgctgaccaacctgctggacagcgacgatgtgcgccatatgctgaatgccctgagtgcgctgggggttcaatataccctgtctgccgaccgcacccgctgcgaagtgaccggcaacggcggcccgttgcgctctgccgcggcgctggagctgttccttggcaacgccggtaccgcgatgcgtccgctggcggcggctctgtgccttggcagcaacgatatcgtgctgaccggcgaaccgcggatgaaagagcgtccgatcggccatctggtggatgccctgcgtcagggcggcgctcagatcgactatctggagcaggaaaattatccaccgctgcgcctgcgcggcggttttcagggcggcaacgtcgaggttgacggcagcgtctccagccagttcctgaccgcgctgctgatgaccgcgccgctggcgccgcaggataccgtcatcgtcattaagggcgatctggtgtcgaaaccctatatcgacattacgctgcacctaatgaaaaccttcggcgttgaggtggacaatcagtcttatcagcgatttgtggtgcgcggcaagcagcagtatcagtcgccgggagattacctggtggaaggcgatgcttcctcggcctcgtatttcctcgccgctggcgccattaagggcggcacggtaaaagtcaccggtatcggccgcaacagcgtacagggcgacattcgtttcgccgacgtactggagaaaatgggcgccaccgtcacctggggcgacgatttcatcgcctgcacccacggcgagctcaaggcggtcgatatggatatgaaccatatcccggacgccgcgatgaccatcgccaccgccgcgctgttcgcgcaagggaccactaccctgcgcaatatctacaactggcgggtcaaggagacggaccgtctgttcgccatggcgaccgagctgcgtaaagtgggcgccgaggtggaagagggggaagattatatccgcatcaccccgccggcaaagttgaagtacgcagaaatcggcacctataacgaccaccggatggcgatgtgcttctcgctggtagcgctgtctgatacgccggtgaccatccttgatcccaaatgtacggccaaaacgttccctgactactttgagcagctggcgcggatcagtaccctcgcctgagtaaaactttgtcatcccgcgggctgatatcctgtcagcccgctataattgcgcaaaacttctgcttttcatttcctgtagtccgtaatttacaagcaatgctcactttccggcgtattgatgcgtataatgcgcggcgtttatattccatgcgccttgctgaaggagaaaaagatgacggcgaatattccggtaatcaccattgatgggcctggcggtgcgggtaaaggtacgttgtgcaaggcaatggcggaagcgctgggctggcatctgttagattcaggcgcgatctaccgcgttctggcgctggcggcgctgcatcatcatgtcgacgtggagtccgaagaggcgctggtgcccctggctgcccatcttgacgtgcgttttatttctactgacggcaacctggaagtggtgctggaaggggaagatgtcagtagcgaaattcgcactcaggaggtcgcgaacgcggcctcgaaagtggcggcttttccgcgcgttcgcgaagcgctgctgcgccgccagcgcgccttccgcgaactgccggggcttatcgccgacggtcgcgatatgggaacggtagttttcccggacgcgccggtgaaaattttcctcgatgcctcggccgacgagcgggcgcatcgccgcatgcggcagttgcaggaaaagggctttgatgttaactttgaacgtcttttgtccgagataaaagagcgtgacgatcgcgaccgaaatcgcgccgtggcgccgcttgtcccggctgccgatgcattagttctcgattcaaccgaactaaacattgagcaagtgattgaaaaagcgctacaatatgcgcgcgaaaaattggccgttgcgtaggccttaaccggtaacgcgccgaagcctccgaattatagcagtaccccgctgcaatggatggtcagcgggtatgtgaaacaaccccatccggcacggagccaggtggacgttaatattaacctgaagattaaacatgactgaatcttttgctcaactgtttgaagaatccttaaaagaaatcgaaacccgcccgggttccatcgttcgtggtgttgttgttgctatcgacaaagacgtagtactggttgacgccggtctgaaatctgagtccgccatcccggctgagcagttcaaaaacgcccagggcgagctggaaatccaggttggtgacgaagttgacgttgctctggatgcagtagaagacggcttcggtgaaactctgctgtcccgtgagaaagctaaacgtcacgaagcttggatcacgctggaaaaagcttacgaagacgctgaaactgttaccggtgttatcaacggcaaagttaaaggtggcttcactgttgagctgaacggtattcgtgcgttcctgccgggttccctggtagacgttcgtccggtgcgcgacacgctgcacctggaaggcaaagagcttgagttcaaagtcatcaagctggaccagaagcgtaacaacgttgttgtttctcgtcgtgccgttatcgaatccgaaaacagcgcagagcgcgatcagctgctggaaaacctgcaggaaggcatggaagtcaaaggtatcgttaagaacctcactgactacggtgcattcgttgatctgggcggcgttgacggcctgctgcacatcaccgatatggcctggaaacgcgttaagcatccgagcgaaatcgtaaacgttggcgacgaaatcactgttaaagtgctgaagttcgaccgcgagcgtacccgtgtatccctgggcctgaaacagctgggcgaagatccgtgggtagctatcgctaaacgttatccggaaggtaccaaactgactggtcgcgtgaccaacctgaccgactacggctgcttcgttgaaatcgaagagggcgttgaaggcctggttcacgtttccgaaatggattggaccaacaaaaacatccacccgtccaaagttgttaacgttggcgacgttgtggaagtaatggttctggatatcgacgaagagcgtcgtcgtatctccctgggtctgaagcagtgcaaatctaacccatggcagcagttcgcggaaacccacaacaagggcgaccgtgttgaaggtaaaatcaagtctatcactgacttcggtatcttcatcggcctggacggcggcatcgacggcctggttcacctgtctgacatctcctggaacgttgcaggcgaagaagcagttcgtgaatacaaaaaaggcgacgaaatcgcagcagttgttctgcaggttgacgcagagcgtgagcgtatctccctgggcgttaaacagctcgcggaagatccgttcaacaactacgttgctctgaacaagaaaggcgctatcgttgttggtaaagtgactgcagttgacgctaaaggcgcaaccgtagaactggctgacggcgtagaaggttacctgcgtgcttctgaagcatcccgtgaccgcgttgaagacgcaactctggttctgagcgttggcgacgaagttgaagcgaaattcaccggcgtggatcgtaagaaccgcgtagtgagcctgtctgtacgtgcgaaagacgaagcggaagaaaaagacgctatcgctaccgtgaacaagcaggaagacgcgaacttctccaacaacgctatggctgaagcgttcaaagcagcgaaaggcgagtaatctttgtcattcaggtaataacaacctgaatagcgacgagtttacttgacagattgcaggattcgtcctgtaatcaagcacaaagggcggctacggccgcccttgtttaagctgttagctaatttttgccttgaaggaaaccggaggaataatgaccaagtcagaattgattgaaagacttgccagccagcaatctcacattccggcgaaagcggtggaagatgctgttaaagaaatgctggaacatatggcctcaacgcttgctcaaggtgagcgcattgaaatccgcggtttcggcagcttttctctgcactatcgagcacctcgcaccggacgtaacccgaaaactggtgataaagtcgaactggaaggtaagtacgttccgcactttaagcccgggaaagaattacgtgaccgcgccaatatttatgaagggtgagttgcacgacgtgcagcctgcctgacgataaagaaagcaccttcgggtgctttttttgtgcccgccatttacggccatcctcacaaaaaaagcgtgcccggctgcaagcgaggcgattgtctggaatgcgccgcgcaagcctgaattcgcctccaggacgccagcaccgctttgcgtaacactgcccactcacagggaggtgtttatgcgtctaccatggcttgccggatgcgccatcattgcaatgctgccgcttctctggctacccgttttgccgggcccgtgcagtctggcgggcgcgggcgcactggcgctggcgctgattcgtctgcatggaagggccgtcgccggagtggcgatgacgcttctgctggtggtctggggagtattgagcgcgcatcaggcgctgtggccgacccggcaccttaccggcgccatccggcaagcggaagtgatccttagcgagacggatggccagaccttgcaccgtggacagatggtgagcctgcggggccgctatctgtttcccccggtaggcgtaacgctgtacggggaacttgcacctgcgccagcctgtgcgggtcaacactggctgatgacgctgcgcctgcgcccggtgcacgggcagctcaatgacgggggcttcgacagccagcgctatgcgctggcgcagcaccgaccgctgagcggagggatcgtcgccgcttccgcgctggatgcccgctgcagtctgcgcgcccgctatctgacgtcgctgacccggcgactgcagacttatccctggcgcgcggtgatgttgggattaggaatgggggagcggctgtctttgccgacggagataaaggtcctgatgcagaacacgggcacttcccatctgatggctatctcgggtctgcatatcgctctcgcggcttctcttatcatgctgttgctgcgcggcgtgcagtatattctcccgggccgctggatcggctggcggttgccgctgctggccgggctggccggcgccgtcggctatgcctggctgacgggtatgcagccgccggccctgcgcacttgcttagggcttgcggtctgttgtgctttacgtttgtcgggtcaacgctggacggcgtggcaggtgtggctctgctgtctgggagcgatactggttgccgacccgctggcggtgctgtcgcaaagcctgtggctatctgccttcgccgtggcggggctgatcttctggttccagtggctcccgttgcctgccggccgctggcgctggccgtggaagaccataattgctcttgttcatttgcaggctggcgtgacgctgctgctgctgccgctgcagttgttgctattccatggagtcagcctgacgtcgatggcggctaatttgctggcggtaccgttagtcaccctgttggcggtgccgcttattctgaccgcgatgctggtgcatctctcggggccggagatagtggagtcgctgctctggctggcggccgatcgcgtgctggcgctactgttttggggattacgacgtttaccggacggctggttgacgctggatactcgctggctgtggatcagtatcctgccgtggctgttggtgatgggctggcgttttcagagctggcggcattcaccggcgctgtgtctcagcgtgctgtttttactgacgcggccattcagccgacaaccgcctgcggacgaatggcgggtgacgatgctggatgtcgggcaggggctggcgatggtgatcgagcgtcacggtaaggcattgctttacgataccgggccggcttggccgcagggtgatagcggtcaacaggtgattatcccgtggttgcgctggcaccatctgcagctgcaagggattatgctgagccatgaacatctggatcatcgcggcggccttgattcagtgctgcaggcatggccgcaggcctgggtgcgcagcccgttaggctgggcgcatcatctgccgtgtcatcgcggtgagcgctggcaatggcagggactcaacttccaggccctgtggccgctgccgggcagcacggcaaagggtaacaatcattcgtgtgtggtgcggatcgatgatggtcgctccagcatcctgctcaccggcgatatagaacgtcaggcggagcaggcgatgatcagccgttactggcggcatctgacgtctacacttattcaggttccccaccacggcagcaatacctcctccagcgcgctgctggtccgccgggtggatggcgcggccgcgctggcctccgcttcgcgctacaatgcgtggcggatgccctcgtacaaggtggttcagcgctaccgccagcggggttatcgctggttcgccacgccgcagcaggggcagataacggtggttttttccgcagaagggtggcaaatccatagcttacgggatcaagttttaccgcgttggtatcatcagtggtttggcgcgcccgccgataacgggtagaatatgcggctatttcaacacaagctggtttattgaatgcagaacgataaagatctctccacgtggcagaccttccgccgactttggccgattatcgcgccgtttaaagccgggctaatcgtagcggcggtggcgttggtgcttaacgcgggcagtgacaccttcatgttatcgcttcttaaaccgttattggatgatggttttggtaaaacggatcgctcagtgctgctatggatgccgctggtggttatcggcctgatggtgctgcgtgggatcaccagctacatctcgagctattgtatttcctgggtttccggcaaagtggtgatgaccatgcgtcgtcgcctgttcggccacatgatgggtatgccggtggccttctttgacaagcagtctaccggaacgctgctgtcacgcatcacctatgattctgagcaggtcgcctcctcttcttccagcgcgctgatcaccgtggtccgcgaaggagcatcgattatcggtctgttcgtgatgatgttctattacagctggcagctgtcgctgatcctgatcgtactggcgccgattgtgtcggtggcgatccgcgtggtctccaagcgttttcgcaatatcagtaagaatatgcagaacacgatggggcaggtcaccaccagcgccgagcagatgctgaaagggcacaaagaggtgctgatgtttggcggccaggaagtggaaaccaaacgttttgataaagtcagcaataaaatgcgtctgcaggggatgaagatggtttccgcctcgtctatctccgacccgatcattcagcttatcgcctccctggcgctggcctttgtcctgtatgccgccagcttcccgagcgtgatggacaccctgaccgccgggaccattaccgtggtcttctcctcgatgattgcgctgatgcgtccgctgaagtcgctgaccaacgtcaatgcccagttccagcgcgggatggcggcgtgccagacgctgtttgcgatcctcgattccgagcaggaaaaagacgaaggtacgcgggtcattgagcgggcgaaaggcaatctcaagttcgagaacgtcacctttacctacccgggtcgcgaagtggccgcgctgcgcaatatcaatctcgatatcccggaagggaaaacagtggcgctggtggggcgctcagggtcgggtaaatcgaccattgccagcctgatcacccgcttctacgatgtcgacgaggggcagatcctgctggatggccacgacctgcgcgagtacaagctgagctcgctgcgcgaccaggtggcgctggtttcacaaaacgtgcatctgttcaacgataccgtcgccaacaatatcgcctatgcccgtaccgaagagtacagccgcgagcagattgaagaggccgcgcgcatggcctacgccatggatttcattaacaagatggataatggtctggataccatcatcggcgagaatggcgtgatgctgtccggcggccagcgccagcgtattgctattgcccgcgcgctgctgcgtaacagcccgatcctgatcctcgatgaagccacctcggcgctggataccgagtccgagcgtgctattcaggcggcgctggatgagctgcagaaaaaccgtacctcgctggttatcgctcaccgtctgtcgaccattgagcaggctgatgaaatcgtggtggttgaagacgggcggatcgtggagcgcggaacgcaccatgacctgctggagcataagggcgtgtacgcccagctgcataagatgcaattcggcgaatgatcgcgcgcatctggtccggggaatcgccgctgtggcgcctgctgctgccgctctcctggctgtatggcctggtgagcggggtgattcgcctcagctatcagctggggtggcaaaaagcctggcgcgcgccggtgccggtggtggtggttggtaacctgaccgctggcggcaatggcaaaacgccggtggtgatctggctggtggagcagctgcagcagcgcggtattcgcgttggcgtcgtgtctcgcggctacggcggtaaagccgaccgctatccgctggtgttggacgacaggaccagtacggcgcaggcgggtgatgaaccggtgttgatccatcagcgtaccggtgccccggtcgctgtcgccccgctgcgcagcgacgcggtaaaagcattgctcagcgcgcacgatctgcagatgattgtgaccgacgatggtttacagcactataagctcgcgcgggacagagaaattgtcgttattgacggcgtgcgccgctttggcaacggctggtggctgcctgccgggccgatgcgcgagcgggcgtcgcgcttgcaaagcgttgatgcggttatcgttaacggcggcgtggcgcgtccgggtgagatcccgatgcggctgcgcccagggatggcggttaacctgcttaccggcgaacgtcgcgatgtctccaccttcacgaacgtggtggcgatggccggcatcggccatccgccgcgcttcttcgccaccctcgaaagctgcggcgtccagccggtcaaaaccgtggcgctggcggaccatcaggcgctgagccaggctgatgtcgccgccctggtgaccgccgatcagacgctgctgatgaccgagaaagatgccgtgaaatgtcgcgatttcgccgctgcaaactggtggtatttaccggtcgacgccataatggccgatgaacgcgcacagcggttgcttgcggacttagcgacgttggcgcaacgttaactgacgcgccggctttgctcgccgctgtgctggaattcctgacggagaacctgcatgtcggtattgcaactatcgcttaacgaggcgcgccacctccatctcgcggcgcaggggttgttaaagaagccccgacgtcgcgctcgcccgaaagacattctttccaccatccagcagatgtcgctgctgcaaatcgataccatcaacgtggtggcccgcagcccctacctggtgctgttcagccgtcttggcagctatccgcagcactggctggatgagtcgctgcgcaacggcgagctaatggaatactgggcgcatgaagcctgctttctgccgcgcagcgatttcgccctggtgcgccatcgcatgttgaatcccgacaatatgggctggaaataccatcgcgcgtggatggaggagcatgccgggagtattgccgagctggtggcgcatatcgggcaaaacggcccggttcgctcggcggattttacccacccgcgcaaaggcgccagcggctggtgggagtggaaaccgcataagcgccaccttgaagggctgtttaccgccggcgaagtgatggtggtggagcggcgcaattttcaccgcgtgtatgatctaacccggcgggtgatgccggactgggacgacgagcgcgacgcgctctcccgcgaagacgcagaggccattatgttgcgcaatagcgcccgtagcctcggcatcttccgcgcccagtggctggccgattactatcgcttgcgccagccggcgctaccgggtctgctggcggcctggcaggaagaggggctggtggtgccggttaacgtggaagcactcggcgagatgtggctgcatcacgaggcgctggcgcagctggagaccgcgcccggcggtaagctgaccgccagccatagcgccgtgctctcgcccttcgacccggtggtctgggatcggaaacgcgctgagcagctgttcaacttcagctatcgcctggagtgttataccccggcgccgaagcgtcagtatggctacttcgtactgcctctgctgcaccagggaaaactggtcgggcggatggacagtaaaatacatcgcaaaagccgggagctggagatcttcgctctatggctggaggagggggtgaagatcacccgtggtctggagcaggggctgcgccgggcgattaacgacttcgcacactggcaatcggcagagcggatcctgtgccgacgcctgccggaagggctgtttgtcggccaggagcaggggtgggaaatcgacgccgattgatcccggcgcctgccttcctgtgatatgctgctgagaaatctatccggtccatcaggaggaaacatggatcaccgtttacttgaaatcatcgcctgcccggtctgtaacggcaagctgtattacagtcaggataagcaagaacttatttgcaaacttgatagcctggcgtttccgctgcgcgacggtatcccggtgctgctggagacagaggcgcgtccgctggcgctagaagagagtcactcatgagtttcgtggtcattattcctgcgcgtttcgcctccacgcgcctgccgggaaaaccactgcaggacattaatggtaagccgatgattgtccatgtgctggagcgcgctcgcgaatccggcgcggatcgcattattgtcgccaccgatcacgaagatgtcgcccgggcggttgaagccgccggcggcgaggtctgtatgacccgcgccgaccatcagtccggcaccgaacggctggcggaagtggtggaaaagtgcgcgttcagcgatgacaccattatcgtcaatattcagggcgatgagccgatgatccccccggcgattgtccgccaggtggcggagaatctggctgccagcagcagcggaatggcgaccctggcggtaccgatccatgatgcggaagaggcgtttaacccgaatgcggtcaaagtggtgatggatgccaagggttacgcgctctatttctcccgcgcgactattccctgggatcgcgatcgctttgcccaatcccgcgagaccatcggtgactccctgctgcgtcacatcggcatctatggctatcgcgccggctttatccgccgctatgtcagctgggcgccgagcccgctggagcagattgaaatgctcgagcagctgcgagtgctgtggtatggcgagaaaatccatgtcgccgtggcggccgaagtgcccggcaccggcgtggataccccggaagatctggagcgcgtccgcgctgagctgcgttagtcctctgtcccctccttgctggaggggacatccccgtcggtttttcgctttttttacccctttttgatcttatccgatgacaacccaggtgcgggcgctcattatgaaaccagtagtgttcataggggtaatcgacaatggaacagttgcgaaccgaactcagtcatcttcttggcgaaaagctaagccgggtggagtgtgtcagtgaacaagccgctacggcgctgtggttcctgtacgatgcgcagggaaacccgatgccgctgctggcgcgaagtttcaccacgcccggcgtggcgcggcagctggcatggaagatctcgaccctggcgcgtaatggtacggtgcgtatgccggtggtttatggcgtcatgacgcacgaagaacatcccggaccagatgtgctgctgcttgagcgcctgcgcggcgtaccggtggaggcgccgacgcgcaccccggcgcgctgggagcaactgcaggagcaaatcgtcgaggcgctgctggcgtggcatcggcaggacagtggcggctgcgtgggaatggtcgacaatacccaggaaaacctgtggccgaactggtaccgccagcgggtagagatattgtggagcaccctgaacctgtatcaggacaccggtctcaccatgcaggataagcgccttttgttccgctcccgcgagtgccttccggagctgttccgcgatttcaatgataatgctgtgctggtgcatggcaacttcactctgcgcagcatgctaaaagatccgcgcagcgatcagctgctggcgatggtggggccggggatgatgctgtgggcgccacgcgagtatgaactgttccgtcttgctgaaggcggccaggcggaacagctgctgtggcgctacctgcagcaggcgccagtttccgaggcctttgtctggcggcgctggctttatctgctgtgggatgaggtggatagtctggtcaacaccgggcgctttgatcgcgcccgttttgacctcgctgcaaaatcactcctgccctggctcgcctgagctgcctttcagccattgccagacgcgaccaagggtttcatagccgacccggtcgctgtgcatcagccacactggagaaggaatggcccgctcccacggattgagcggcgaggtcaccgccagctgattggccggcgcgggaagcggatccaggccggcatggcgaaagaatatcatcgcccgcggaaggtgtgacgccgaggtgaccagcaggaagggcgcgtcgccgatggcgtgcttcaccgccagcgcttcctcttctgtatctttcggccgatcgagcacaatgatatcgctgcgaggtacgccaaggctctccgccactctcgccccggcttccgccgtgctgacggggttcgttttcgccgccgcgccggtaaagatcattttcgaaccgggattcgcctgccacaggcggatgccctccgtcaggcgcggcaggctgttattgataagattagagcttggcgcccactccggattccaggtatagccgccgcccagcaccaccacgtagttcaccggctgctcgccgcgccaggtggggtaggtatcttcaatcggtttcagcaggctgtcggccacgggttgcaggctcagcagcgtcagcagcagccagccgaggctcacgcatagcttcccggtacgctgaaagcggctgaaccataacagcgcgatcccgataccgatcagcaacagtaaggcgggtagcggcaacagcaggccgccgacgatcttttttagcgtgaaaagcatgccagatggttccttttttaaccatataaccaaagttatgttcggatcttataacagatcgcttcattctcggcgtgggtatgacaaaatagcggttttgtgttggcttgtggagtcactcgtgcaggatcgcaatttcgatgacattgctgaaaagttttcgcgcaatatttacggcaccacaaaaggccagttgcgtcaggcgatcctttggcaggatctggaaccgctgttggcgcagctggggccgggaccgctgagggtgctggatgccggcggcggcgaaggacaaacggccatcaaagtcgcgcaactgggccatcacgtgacgctctgcgatctctccgctgagatggtggctcgcgcccgccaggcggccgccgataaaggtgtgatcgacaacatgcattttgtacaatgcgcggctcaggatattgcgcagcatttggaaagcccggtcgatctggtactgtttcatgcggtgctggagtgggtggcggagccccaggaaatactgcataccctgtggtcgacgctgcgtgctggcggtggactgtcattgatgttctacaatgctaacggcctgttgatgcacaatatggttgccggtaattttgattacgttcaactgggcatgccaaaaaagaaaaaacgcacgctgtcgccggattatccgcgtgaaccacagcaggtttatcactggctggaagagattggctggcagatcgtcagcaaaaccggcgtgcgggtgtttcatgattatctgcgtgaaaaacgccaacagcatgacagctatgcggcgctgctggcgctggagacgcgctactgtcgtcaggagccgtatctcagcctgggccgttatattcatgtcaccgcgcttaagagccaggctcatagccgcagatgcaaggataaagtatgagtgaattttcccagacagtccccgaactggttgcctgggccagaaaaaatgatttttcaatctcgctaccggtcgacagactctctttcctgctggcgatcgccactctgaatggtgaacgactggaaggggaaatgagcgagggtgaactggtggatgcgttccgccacgtcagtgatgcgtttgagcagaccagcgaaaccatcagccagcgcgccaataacgcgatcaacgatttggtgcgccagcgtctgctgaaccgctttaccagcgaaattaccgaaggcaatgcgatctatcgcctgacgccgttggggattgggatcaccgattattatatccgtcagcgcgaattctcgacgctgcgtctctcgatgcagctgtcgatcgtcgccggcgagctgaagcgcgcggcggacgccgcggaagagggcggtgatgaattccactggcatcgcaacgtttttgcgccgctgaagtattccgtagcggaaattttcgacagcatcgacctgacgcagcgcattatggatgagcagcagcagctggtgaaagacgatatcgcgcagttgttgaataaagactggcgcgcggcgatttccagctgtgaactgctgctgtcggaaacctccggcaccctgcgcgaactgcaggatacgctggatgcggcaggggataagctgcaggcgaacctgctgcgcattcaggactcgaccatggcgcgcgacgatctccattttgtcgatcggctggtgttcgatctgcaaagcaagctcgaccgcatcgtcagctggggtcagcaggcgattgacctgtggatcggctacgaccgccatgtgcacaagtttatccgtaccgctatcgatatggataagaaccgcgtcttcgcccagcgtctgcgccagtcggtgcagacctattttgatgaaccgtgggcgctaacttacgccaacgccgaccgcctgttggatatgcgcgatgaagagatggccctgcgcgatgaagaggtcaccggcgagctgccggcggacctcgaatttgaagagtttaacgaaattcgcgagcagctggcggcgctgatcgaagcgcagctggcggtctataaagagaaaggaataccgctggatctcggcctggtggcgcgggagttcctggcgcagtatccgcgcgggcgtcacttcgacgtggcgcggatcgtcgtggatcaggcggtacagctgggcgtcgcccaggcagatttcaccggactgccggcaaaatggcagccgattaatgattacggagccaaggtacaggcgcatgtcattgacaaatattgaacaagtgatgccggttaagctggcgcaggcgttggccaatccgttatttccggcgctggacagcgccctgcgcgcgggccgtcatatcggtctcgacgagctggataatcacgcatttttgatggattttcaggattacctggaagagttttacgctcgctataacgtcgagctgatccgcgcgccggagggattcttctacctgcgcccgcggtccaccacgctgatttcgcgctcggtactgtccgagctggatatgatggtgggcaaaattctttgctatctctatctcagcccggagcgcctggcgaacgaagggatttttacccagcaggagctctatgacgagctgctgaccctggccgatgaatccaggctgctgaagctggtgaacaaccgttccaccggttcggatctggaccgccagaagctgcaggaaaaaatgcgggcctcgcttaaccgcttacgccgtctggggatggtgtggtttatgggccacgatagcagcaagtttcgcattaccgaatcggtattccgctttggcgccgatgtgcgcgccggcgacgacccgcgcgaagcgcagcgccgtctgatccgcgacggggaagcgatggccctggaaaatcacctgcagctcaatgatgagaatgaagaaaaccagccggatagcggggaggaagagtaatgattgaacgcggtaagtttcgctcgctaacgctggttaactggaacggcttctttgcccggacctttgatcttgatgaactggtgaccaccctctccggggggaacggcgcgggtaagtccacgaccatggcggccttcgtcacggcgctgatcccggatttaaccctgctgcacttccgtaacaccaccgaagcgggggccaccagcggctcacgcgataaaggcctgcacggtaagctgcgcgccggggtgtgttactcggtactcgatgtgatcaactcccgccaccagcgcgtggtggtcggcgtgcgcctgcagcaggtcgccgggcgcgatcgtaaagtcgatattaaacctttcgccattcagggactgccgacctctatcctgccgacccagctgttgaccgaaacgctgaacgatcgccaggcgcgcgtcgtgagcctcaacgagctgaaagataaactcgaggcgatggaaggggtccagtttaaacagttcaactcgatcaccgaatatcactcgctaatgttcgatctgggcgtggtggcgcgtcgcctgcgttccgcctccgatcgtagcaagtactaccgcctgattgaggcctcgctgtacggcgggatctccagcaccattacccgctcgctgcgcgactacctgctgccggaaaacagcggcgtgcgtaaagcgttccaggatatggaagcggcgctgcgggaaaaccgcatgacgctggaagccattcgcgttacccagtccgaccgcgatctgtttaaacacctgatcagcgaagccaccaactacgtggcggcggactatatgcgtcacgccaacgagaggcgcattcacctggataaggcgctggagtatcgccgcgatctcttcacctcgcgttcgcagctggcggctgagcagtataagcacgtcgacatggcgcgcgaactgcaggagcataacggcgcggagggcgatctggaagccgattaccaggccgccagcgatcacctgaacctggtgcagactgcgctgcgtcagcaggaaaaaatcgagcgctacgaagcggatctcgacgagctgcagatccgtctggaagagcagaatgaagtggtggcggaagccgtcgatcgtcaggaagagaacgaagcccgcgctgaggccgccgagctggaagtggatgagctgaaaagccaactcgccgactatcagcaggcgctcgatgtgcagcagacccgcgccattcagtataaccaggcgctgcaggcgctggagcgcgcgaaggcgctgtgccatctgccggatctgaccccggagagcgccgacgagtggctggaaaccttccaggcgaaagagcaggaagcgacggagaaaatgctgtcgctggaacagaaaatgagcgtggcgcaaaccgcgcacagccagtttgaacaggcttaccagttggtggcggcgattaacggcccgctggcgcgcaatgaagcctgggacgtagcgcgcgaattgctgcgcgacggcgtgaaccagcgccaccaggccgagcaggcgcaggggctgcgcagccgcctcaacgagcttgaacagcgcctgcgcgagcagcaggacgctgagcgtcagctggccgagttctgcaaacgccagggtaaacgctacgatatcgacgatctggaaacgctgcatcaggagctggaagcgcgcatcgcgtcgctggccgacagcgtctccaatgctcaggagcagcgcatggcgctgcgtcaggagctggagcaactgcagtcgcgtacccagacgctgatgcgtcgggcgccggtctggctggcggcgcagaacagccttaaccagctgtgcgagcaaagcggcgagcagtttgcgtccggccaggaggtcaccgaatacctgcagcagctgctggagcgtgaacgagaggctatcgttgaacgtgacgaggtcggcgcccgcaagcgcgccatcgacgaagaaatcgagcgtcttagccagccgggcggttcggaagatccgcgcctcaacgccctggcggaacggttcggcggcgttctgctgtccgagatctacgatgatgttagcctggacgatgcgccgtacttctccgcgctgtacggtccgtcgcgccatgcgatcgtggtaccggatctgtcgcgggtagccgagcagcttgagggactggaagattgcccggaagatctctatctgatcgaaggcgatccgcagtccttcgatgacagcgtattcagcgtcgacgagctggaaaaagcggtggtggtgaagattgccgatcgccagtggcgttattcgcgcttcccgtcgctgccgctgtttggccgcgcggcacgtgaaaaccgcattgaaaccctgcatgccgagcgtgaatcgctgtcagagcgttttgcgaccctgtcgttcgatgtgcagaaaacccagcgcctgcaccaggccttcagccgctttatcggcagccatctggcggtggctttcgaggacgatccggaagaagagatccgcaaactcaacagccgccgcggcgagctggagcgtgcgctgagcgcccatgaaagcgataaccaacagaaccgtgtgcagtacgagcaggcgaaagagggcgtgtcggcgctcaaccgcctgctgccgcgcctgaacctgctggcggatgatacgctggccgaccgcgtggacgagatccaggaacgtctggacgaagcgcaggaggccgcgcgctttattcagcagcacggtaaccagctggcgaagctggagcctattgtttcggtgctgcagagcgatccggagcagtttgagcagctgaaagaagattacgcctatgcgcagcaaacccagcgcgatgcgcgtcagcaggcttttgccctggcggaagttgtgcagcgcagggcccacttcagctactccgattcggcggaaatgctcagcggcaacagcgatctcaacgagaagctgcgccagcgtctggagcaggcggagtccgaacgcagccgcgcgcgcgacgcgttgcgtgcccatgcggcgcagcttagtcagtacaatcaggtgctggcctcgctgaagagctcgtatgacaccaagaaagagctgctcaacgatctgtataaagaattgcaggacattggcgtgcgcgccgacgccggcgcggaagagcgtgctcgcgcgcgtcgcgatgagctgcacatgcagctgagcaataaccgctcccgacgcaatcagctggagaaagcgttgaccttctgcgaagcggaaatggacaacctgacccgtaaactgcgcaagctggagcgcgattactgcgaaatgcgcgagcaggtggtgaccgccaaggcgggctggtgcgcggtgatgcgtctggtgaaagacaacggcgtcgaacgtcgtctgcatcgccgcgagctggcctatctctccgccgatgagctgcgctcaatgtcggataaggcgctgggggcgctgcgtctggcggtcgccgataacgaacatctgcgtgacgtgctgcgtatctcggaagatccgaagcgtccggagcgcaaaattcagttcttcgttgccgtataccagcatctgcgcgagcgtattcgtcaggatattattcgcaccgatgatccggtggaagcgatcgagcagatggagatcgagctcagccgcctgaccgaagagctgaccaaccgtgaacagaagctggcgatcagttcccgcagcgtggccaacattattcgcaaaaccattcagcgcgagcagaaccgtatccggatgctcaaccagggtctgcagagcgtctccttcggccaggtcaacagcgtgcgtctgaacgtcaatgtgcgtgagacccactcgatgctgctcgacgtgctctccgagcagcatgagcagcaccaggatctgtttaacagcaatcgtctgaccttctctgaggcgctggccaagctctatcagcgtctcaacccacagatcgacatggggcagcgcacgccgcaaaccatcggtgaagagctgctcgactaccgcaactatctggagatggaagtggaagttaaccgcggctccgacggctggctgcgcgcggagtccggcgcgctgtctaccggggaagctatcggtaccgggatgtcgattctggtgatggtggtgcagagttgggaagatgaatcccgtcgcctgcgcggcaaggatatctcgccttgccgtctgctgttcctcgatgaagcggcgcgtctcgacgcccgctccatcgccaccctgttcgagctgtgcgaacgtctggagatgcagctgattatcgcagcgccggagaacatcagtccggaaaaaggcactacctataaactggtgcgtaaggtgttcaataatcacgaacatgtgcacgtcgtggggctgcgcgggtttgccgcgccgctgccggaagcgctgccgggaacggccgacgcctcctgacgatgcagctcactactggcgggtaagcgctgaaaagggcaacgttaagttgccctttttgctatccagcttgctatgccagggtggtataatctttaagcttctttacattaggtaaggcaaaagccttttcgtctttatatactgtgttaaagcccacgaatttgtgggcggcaatgtgtgacaacagggggcaagggatgttgcttaagaaacggtatggtcgtccattgtcagcgctcagtctgagcctggcaatggcatttgctccgctgttcaatgtccaggccgcagagcctgaagtcgtaccaggtgatagctccgctacgcctggagagctttccgtcgcgctgtcgcaaagcgacgggcaatcgccggcggtcgcgaagctggccggtgagcagccgctgtcgatggaagccgcggcgaacagtcgcgcccagatcgaagcgctattgccggctggctacaaacccgtctttatgaatccgctggtctcgctatacgccgccagggatatgaaaccgatgtgggaaaaccgcgaggcggtgcaggcgttccagcagcagctggcggagatcgccatcgccggttttcagccgcagtttaccacctgggtcagtctgctgaccgatcctgccgtcaccggcatggcgcgcgatgtggtgttgtctgatgccatgatgggctatctgcactttatcagcggcatccccacccaggggacccgctggttatatagctcgacaccgtacaagatggcgacctcgccgctgtcggtgattaaccagtggcagctggcgctggataatggctccctgccggcgtttatcgccggcctggcgccgcgtcatccgcagtatgaggccatgcaccagtcgctgctggcgctggtggctgattcacgtccatggccgcagatgaccggcagcggctcgctgcgcccgggagaatggagcaatgatatcggcgcgctgcgcgagatcctccagcgtactgggatgctggaaaattccgccaatatcgttctgcccggcgacgtggtgagtccttcggcgaagaaaaagagcaagcccgcggcgcgcggtgtgtacgatcgccagctggtggagggcgttaagcgctttcaggccatgcaggggctgggggcggatggggtcatcggccaatccacccgtgactggctcaatgtctcatcggcgcagcgcgctggcgtgctggcgctgaacattcagcgtctacgtctgctgccaggcaaactatcgactggtatcatggtgaatattcccgcgttttcgctggtctattaccaggacggcagtcaggtgctggcctcgcgggtgatcgtcggacgtccggaccgcaagacgccgatgatgagcagcgcgctgaacaacgtagtggtcaatccgccgtggaacgtaccgcccaccctggcgcgcaaagatattctgccgaaggtgcgtaataatcctggctatctggagcagcatggctacaccgtgatgcgcggctggaacagtaaagagaccatcgatccttaccgggttgactggtcaaccatcaccgagaacaatttaccgttccgttttcagcaggcgcctggggcacgtaattcactggggcgttacaagtttaatatgccgagttcggatgctatctatctgcacgatacgccgaatcataatctgtttcagaaggatgtccgtgcgctcagttccggctgcgtcagggtcaataaagcctcggagctggccaatatgctgctgcaggacgcgggctggaatgacacgcgcatttccgacgccctgaagcagggggatacgcgctatgtcaatattcggcaaaatataccggtgaatttatattacttaacggcgtttgtggacgctgatggacgtacacaatatcgaacagatatttacaattacgatatcaccgcgcgatccagcgcacaaattctgacgaaagcggaacaattaatcaggtaaatgaagtagttcaatggattttgttgtcctagcactgggtaaaaaagggcgctgcacctctgcagcgcccgattttcctggggtgaggctgccttgacgttggcaataatgcccggtaaggtgcctttcgtgcgccagaagtgcatatacatatcattccgctcaatgcgtagcgcggttagcgcgaacgttctcctttgccgggcaacatctcggtcgtggcgagcgatagcgagctgatcctggcatcgcgcaaagcggaaaaagtatataacgattcattgactgtagacctgattatcatggacaaatttgacgctaatcgccgcagattgctggcgttgggtggcgctgcgctgggtgctgccgccattctccctgcgccggcatttgccaccctctcgaccccccgtccgcgtattttgacgctgaataacctgcataccggtgaatcgctcagggcggagtttttcgatggcagaggctatattcaggatgaattagcaagacttaaccattttttccgtgactatcgcgcgaataaaattaagtccatcgatccaaatctgttcgatcatctttatcggttgcagggactacttggcaccaacaaacctgtccagcttatctctggctatcgttccctcgataccaacgatgagcttcgcgcacgcagccgtggtgtagcgaaacacagctatcacaccaaggggcaggcgatggatttccatattgaaggtatttcgttaagcaatattcgcaaagcggcgttatctatgcgcgcaggtggtgtaggatattacccacgtagtaactttgtgcatattgataccggtcccgtaaggcactggtaacgaaaggagcgtcatgaactatcgtattattccggttaccgcgttcgcgcagaactgttctcttatctggtgcgggcaaacccggctggcggcgctggtcgatcctggcggcgatgctgaacgtatcaaagcggtggtggcggaggctggcgtcacgctgatgcagatcctgctgacgcatggccacctcgatcacgttggcgccgcggctgaactggcgcagcattatggcgtaccggttattggtccggaaaaagaggatgagttctggctggaaggattaccggcgcaaagccggatgttcggcctggaggattgccaaccgctgcgtccggatcgctggctcaatgaaggcgatgtggtcaatgtggggaatgtggcgctgcaggtgctgcactgcccgggccatacgccgggccatgtggtcttttttgatgacgcctcccgactgctgatctccggagacgtgattttcaaaggcggggtgggacgcagcgattttccgcgcggcgaccatgggcagctgattgcggctatcaaggaaaagctgttgccgctgggcgatgatgtgacctttattcccggccatggtccgctgtcgacgctgggtgaggaacgccgtaataacccgtttctgcaggatgagatgccggtctggtaacagacatgacgcgaacacataaaaaaggccgcattcgcggcctttttctttataccgaatactatcgcttacagtacggcgacgatggcttcgcacagcggcgccatattgtcaggcgtcatcccggccacgttgatacgtccggaagctaccgcatagatggcgaactcttcacgcaggcgcagcacctgctctttagtcaggccgctgaatgagaacatgccgttctgctggctgataaagctgaagtcgcggctcgcgcctttctcctgcagggtattgacgaacagcagacgcatacgctggatgcgctggcgcatatcggtcagttcctgctcccagattgcccgtagcgcatcgttgctcagaatggtggcgaccacggaggcgccatgcgcaggcgggttcgagtagttggcgcggatcaccgacttcatctgactgaaggcgcggtctacagtctcttgatccgcggcgaccagagtgcaggcgccgacgcgctcgttgtacaggccaaagtttttcgagtaggagctggcgaccagcagctctttatgtagagcagcaaaagcgcgtagcccttcagcatcttcttccagaccgcgggcgaagccctggtaggcgaaatcgaacagcggtagccagcctttttccaccgacagctgcgccagctgctgccactgatcgagtgtcggatcgataccggtcgggttgtggcagcagccgtggaacagtaccacgtcgcccgcctgggcttcgttcaggctggccagcagaccatcaaagtccagcgcgtggttagccgcgtcgtagtatgcgtattcgcgcacttccagcccggcagaggtgaatacgcttttatggttcggccagctcggattacttacccacacacgtttcacgtcggtgtttttggcgaggaagtctgcggcgacacgcagcgcaccggtaccgcccggtgtctgcgcggtgcgggcgcgtttatcagcgataatcgcattgcctttaccgaacagcagctcctgggtgcagcgaccaaattcaggaataccatcgatgcccagatagtttttagtcgtttcattttccagcagatactgctctgcttttttgacgctggtcagaacgggcgttttaccggtttcatccttgtaaacaccaattccgaggttaattttttcagggcggtcatcggcacgaaacagatcggccagacctaaaatcgggtcggctggggcggcggtaatgttctcaaacatgacgaggttccattgtgattactgaagggaaatccgctatcaggttaacgggagaataacgaattgccaaccgtttgcgacaaaaagcgcgaaggttttcgaaagagacgatctttgtctcacgaatacagaaaagcaggaccgaagtcctgctttgaaggcatatcacgaaggggtgtactgcagattagaactggtaaacgatacccacggccgcctggtcgtcagtggcgacaccagccgctttggtgtaatcgttgtcgtccagctggttgaatttatacgcagcgtagacgttcatgttcttgttaaagtagtaccaggtacccacttcgatgtatttaaccagatccgcatcgccgccggagaagccagcacgcgactgcaggtccttgcctttggtctgtacgtagccgatggacggacgcaggccgaagtcaaactgatactgtacaactgcttcaaagttctgagttttaccagcgaagtggttatcttcttccggagtcatgttgtaagtctgggagtacatgacggccgcatagatgttgttagcgtcatattttgcagaggtcgcccaggcttcggctttgtcgccattgccgtcagctttctgatcgacgctacggttagagctggagtagcctgcagacagtgcgataccgttgtcgaacgcgtaggtggctgcggtgctgaagccgtcgccattctgcttgcgaatcgcacggtcatggtcgtttttaccctggtactgcagcgcgaagctcagaccgtcaaccagaccgaagaagtcggagttacggtaggttgcgacgccgttggtacgaccggtcatgtagttgtcggtatagttccagccgtcaccgccccattcaaccagcatatcggttgccgcttcgacgtcgtagatcgcgccgtagttacggccatagtcgaatgaaccgtattcgcccgctttcaggcctgcgaacgctagacgggtttttgtggtctgggaaccttcaacattggacgcgtccatgttgtattcccactggccgtagccgatcagctgatcgttgatctgagtttcgcctttcaggccgatacgggcataggtggtatcgtcgctgctggtgtcgccattggtggtccagacgtgctcgccgaccatttttccatagaagtccagtttgttgccgttttgttatagatttctgcagcgttggctgcaccggctaccagcagggcagggatcaccactgccagaatattgcgcttcatcattatttattaccctcattaatattttttatatgaacacgtgccactgccgtcaaaaagttctgtcaataaaaacttacagaaccattgatgagagtttggtgtctgaaggcatctttccatccgcgacaacgtttcgctagccggaaaatgctacgaatatctcatatgagtaacaaaacgaaaaatcatgtaactaaatgtgtatttaacggaactttgtgaacttaatcaaaattccgttccaccggataagggcaaacgccattacttatctatctatatgaattatttatgattaatttggctaagcggcaattcgttcattttgtgtattgaattcgtattctttttattcagtctctgtctttgcaagatgtgcgggtaaaggtcaaaaaatgagcaaatttatcagcggttttgctcagttatgaacataaagtgcgatctacatcaccaggatgcaccgaaacagtgcgtaacataattgtgatttccaggtcttgatgtttaaggttgttgaattttactaacagtaattgacataaaaaaaggccagcttgcgctggcctttcagattgatgtcagaaaaatttagaatgtcgcgttgcgcggcgtccgcgggaacggaataacatcgcggacgttctgcacgccggtgacgtaagcgatgaggcgttcgaagcccagaccgaagccggaatgcggcacggtgccgtagcgacgcaggtcgcgataccaccagtagtcttctttgttaagccccatctctgccatacgcgcgtcaagcacgtcgagacgctcttcacgctgggaaccgccgataatctcgccgatgcccggcgccagaacgtccattgccgcgacggttttaccgtcttcgttaaggcgcatatagaacgctttaatgtctttcgggtagtttttcaccaccaccggcgctttgaagtgctcttcggccaggtaacgttcgtgctcagaggagagatccacgccccagtacaccgggttctcgaactgtttgccgcagttttccagaatggtgacggcgtcggtgtaatccacctgggcaaaatcagcggtgataaagcgctgcagacggtcgatagcgtctttatccacgcgctcggcgaagaactgcatgtcgtccgcacgctcttccagtaccgctttgaagacgtacttgagcatcgcttccgccaggccggcaacgtcgttcaggttggcgaaggccacttccggctccagcatccagaattccgccaggtggcggctggtgttggagttctcggcgcggaaggtcgggccgaaggtataaatcttcgacagcgcacaggcgtaggtctcgccgttcagctggccggaaacggtcaggaacgactctttaccgaagaagtctttgtcgaaatcgactttgccctgatcgttacgcggcaggttttccagatccagcgtcgacacgcggaacatttcgccggcgccttcggtatcggaggcggtgatcagcggggtggaaacccagaagaagccctgttcgttgaagaagcggtgcagcgcctgcgccagggtgtgacgcacgcgggctaccgcgccaatcaggttggtgcgcggacgcaggtgcgctacttcacgcagatactcgatgctgtggcgcttggccgccatcgggtaggtgtccgggtcttccacccagccggtcacttccacgctggtcgcctggatctcaaagctttgaccctgaccctgagaagccacgactttaccggtgacaatcaccgagcagccggtggtcagacgcagcacttcctgattgtaattgggcagagaattattaataacggcctgtacaggatcaaagcaggaaccgtcatagacggcgaggaaagaaaagccagctttagaatctcggcgggtacgcacccatccgcggaccgtgacttcgctgtcaacggcaacgcggccctggagtacgtcggctacaggcacaacgctcataataatctctctatgtagtccaataaaaaagtctcttcccccaacagcggggggatatctatgttacctgtcatcttccatcagacaagtagatttcgcacagggaagggtggatttcggaaataaatacacctccggggcgttctttggctccccatttcgacttttacacgacttactcgataatgaccgtcatttcctgcttcgcattttgcatcgacacgatggtccggaaagacttgatatttcccgaggcaaaaaagagttcacgggttagcgcttcgtattccgccatatcacggacgttgatcacgagcagaaaatcgaagtcgccagtgacatagtagacctgctgcacttgcggacaggttacgaaacgctgtttatcctcctcaagcagatcgagacgttcattctcaatggtcacctgcaccataatggtgattggtcttcccactttactggcgtccactaagctaacactgcctttaatcacccctgcatcctccagtgcagcgatacgccgattgactgccgaaggagacaggctgatccgatcggcgatctcccgttgcgacaagcgattattacgctgcaagagcgtaagaatttttttatcccatgcgtcaagtttcatcatatatctcgtcctgcaagcctgtgatcaacctcactaatgcaacgttgttgcgtgtgaatgataaaacagagtgaaaattgcggcgcgatgggcaactttgcgccaattaaccgccgggcgcagtgtaccatcacaggcagtgggaaagcggtatatcgcgacaaaaagcctctcacattctgacttaaccaatttaaagcgaccgtcctgtctcaggccgcacggatccgtgcacccgtcgtttaggcggaatggtcgcaaataacgttatcgtcgcaggacgatatgaaaatagaggtgcctgaatagtggacacaattaaatttcaacttaacgcccggcggcagccctatggccagggagcagacttgagtctgctgaatgaaagcgtggggaacgaagtgctggcattccatcaaaaatttcctgattaccgggtcacgccgctgcgtaagctggaatttttaagccagcggctggggctgggatcgatccatataaaagatgaagcgcagcgattcggtttgaatgcgtttaaaggattaggcggatcttatgcgatggggaaatatctcgccgctctgcttgagcgagatattaatacgttgagctttgccgagcttaattcaccagtgattaaggcgcgtatcaaggacatcgtatttgtgactgctaccgacggtaaccacggacgtggcgtggcgtgggcggctgagcagcttgggctgcgtgcggtggtgtatatgccaaaaggctcgtcgccggtacgcgcgcagaatattcgccggcatggcgccgaatgcacgattactgaactgaactacgacgacacagttcggctggcggccaaaaccgcgcgcgagcagggatgggttctactccaggataccgcctggcagggctacgagcagatccccacatggatcatgcaaggctatatgaccctcgctgttgaaatctggcagcagctggcagaaagcggagcgccgatgccgacgcatctgtttttacaagccggggtcgggtcgtttgccggtagcatcatgggatatttcatcgaaaagatgcagcagcaggctcccaccatcatcatcgttgagccgcacaaggcgaactgcctgtatcgctcggcaaccattaatgacggactgccgcacagcgtcggcggggatatgtcaactctgatggccgggcttgcctgtggtgaacctaacatcaccagctggccaatgctccgcgaccatgccacctgttttatttccgccgacgattgtctggcggccaacggcatgcgcctgttggccgctccgcgtccaggtactgacgaaccttttgtctccggggaatccggcgctattggcacaggagtgctttatgcgctgatgactcaaccggcgtatcgcgagcttgccgaatcgctgcgcctgaatgccgatgcacaggttctgttaatcagcacggaaggagatacatcacccgatgtctatgaagacatcgtctggtttggccgtaatggttgagcgctatcgacaataacaagggggccatcttacctaccctacaagccctcggtatgacaagcgttctgactcataacgaaaacatacgcgctttcgcgtcatgcatagagagaacctgaccgatgaatactgaaaatataattatcaataaaggatattccgatcccgcaaagtggcatagcgaagataccgtttgggtccttggcctgttcggtaccgccattggcgccggggtgctgtttctgccgattaatgccggaattggcggcttctggccgctgctgattgtttttgtcctcgcttttcctattacttatctggctcaccgcggtctggcgagattcatttactcttccaatacgccggaaagcagtattaccgatgttattggcgagcattttggcgcgctggcgggaaaagtatttaccgtcatctatttcttcgccgtctataccattctgattatgtatgcggtggctatcaccaacaccgcgcagagctttatcacccaccagttggcgatggccgagcctccccggtcgctggtggccatcgttctgatcctcgggctgatgtttatcgtccgtttcggacagcgtttgataatgcgggtgatgagcaccctggtttatcccttcatcatctcgcttatttttatggcactttttctgattccgcactggaacggcgcaattttgcaaaccgtaagcttcagcgccacgggcgatgggcaggggatcatgttatccctgtggatgaccttcccggtactggtgatgtcgtttaaccactatcccatcatttcgccgatggtggtgcgccagaagcagcgttacggtctggcgctcgctgagggtaaatgtgcgcagatccagcgctacggtatcctgctcatgacggtggtggtgctgttttttgttctcagctgcgtgttaagcctgtcgccgcagcaactggcggaagccaaagcccagaatctgtcgattttgtcctatctggccaatcagtacgatacaccgattattgcctggctatcgccgattatcgcctttgtcgctattactaaatcatttcttggccactacatcggcgcctatgaatcgctgcgcgacctgattctggaggccgccgccgcacgcgggaaaaaacctggtattcgcctcgtcgacgcggtcatcctggtgtttatggtgcttacctgctggttcgccgcgtacaagaaccccagtatcctcggtattatcgaatgcatcagcggtcccaccggggcggcaattctgctgctgttgcctatgtacgccattcataaattaccggtgcttgccccctggcgcggtaaagcgagcaacgttttcgtcaccctgatcggtcttatcaccgtatctgccattttttacggcatgttccaataaccaccattattagcgagatgttatatgagtcattatctgcagattaacggccaacggcttatcgattccctgtatgcacttggcgaacatggtgcgctgccaggcggcggcgtatgccgcctggcagcgactgccgaagataaagccggcagggactttgttgtagcccgcatgaaggcgctgggcctgagcgtgtcaattgatgctatcggcaatgtcaccggcgtttatcacggcgaggagacgttgccgatggtgatgatggggtcacatatcgataccgtcgccacaggtgggttatacgatggcaactacggcgttatggccggccttgaggtgattgccaccctccaggatgccgggatccgcacccgacgaccgttggcggtaaccttctttactaacgaggagggggtgcgatttcagcccgatatgatgggcagcgtggtgtttgccggcgagtatccgttggcgcaggcgctcgcggcaaaagatctcgacggtatcacgctcgatgaagcgctgcgtaacattggttataaaggcgaacgtcagccgggagatatggcggtagatagctacgttgagctgcatatcgaacagggaccaattcttgataaagagcagattgatattggcgtggttaccggcgtacagggtatttcgtggcaggaatttaccctgagaggcgtatcgaatcatgcgggtacaaccccaatgtccatgagacgtgatgccgggctggcggctgcgaaaatcgctgtttttgcccgtgagctggcgctaagccttggtggcgatcaagtagctaccgttggacatttcagcgtgaagcctaatctaatcaacgtcattcccaaccatgtcgtcatgtcagtggatctccgcaataccgataatgcgatcttatgtctggcggagcagcaattagccgaatttgtcgcgaaaacgtcgcaggaagagggcgtggagataaccagccgctcactggtgcgctttaatccggtcatctttgccgatgagatcgtcaatgcggtggaagccgaggcggagcgtcaggggctcagttaccgacgtttgccaagcggcgccggacacgatgcacaatttatggcgtcggtatgtcccgccgggatgatttttgtcccctgcgtcgatggcattagccataacgtcaaagaacatagcgcagccaaagatctgattgctggcgccaatatgctgctgcaggtggttttacagcgcgcccagcgtatggactaatgtttacaggagcagagaatgaatcagcaacagctaaagcagcagcttatcgcctggcgtcactatttgcatgcccatccggaaagcgccttcgaggagcagaatacttcacggtttattgccgaaaagctcgaagctatgggcattgaggtgcaccgcgatattggcaaaaccggggtggtggggagattgaaatgcggcgacgggaagggcgttatcgctattcgtgccgatatcgatgccattcaattgaccgaacagggagactggtcttaccgctccatgaccgccgagcggatgcacggctgcggacatgatggtcatacctgcattgcgctgggcgcggcgcagttgctattgcagcggcagaattttaacggcacggtctgctttgtttttcagcctgctgaggaacctggctatggcgccagagcgatgatggacgatggcgttattgaacgctttggcatagaggaaatctacggtctgcataatatgccgggtatgaaagccgggactatcgccacgcgagtcggtggcattatggccagtgaagataactttattattcgtattaaagggcagggagcgcatgcggcgcggccgcatatggcgaaagatccgctggtcattgcggcggaaatcatcctggctttgcagacaattgtttcgcgaaatgttgatccgaacgtgccagcggtcatttcctgtactgaactgcacaccgatggcatccgcaatgcgattccgacgcacgtcgaaatcaaaggggatacgcgcagctttgcaccggaggtacagatgctgctcgaagaacgaatgcgtaccattagcgaagcgatttgcgcgatgcacggtgcgacgtgccagttcagctatacccatgaatttgcgccaacggtgaactggcagcaatgcgttgatgtagcggtcaccgctgcgattaacgtggtaggggctgagaaggtgaacggcaacgtcgcacagatgatgatttcggaagattttggcgcttttctgcaaaaaatccccggctgtttcatctttttaggcaacggcgatagttcagatgctcagggcaatacaccgttgcataatgcctgctacgactttaatgatgagatattgctaactggcgcggagtattttgccgaggtcgtcagagcccgtttgccgcaggagtgatattgattggcccgatagcagaatgccgtcgggccaagttttttagcttgcctttttaatcggcggcaggtcgaacgcttcgcgcagggcgcggacgaaggccttatcgtggcagatagttttccccgggctgtcggagagtttcgccaccggcttgccgttacattccaccagcttaatcacgatattgagcggtttaacctgcggcagatcgcaggttaaacgggtgccgatcccaaagctgagcttcacccgcgaggcgaagtggcgatacagatcgacggctttcgccaggtcgagattgtcggagaagaccagcactttgctcagcggatcgatacccagcttctgataatgggcgatagctttttctccccattccaccgggtcgccggaatcgtggcgcaacccctgatagcgggtggcgaattccggaccgaaatcgcgcaggaacgcatccatagtgatgcagtcggtcagcgcgatgcccagctggtcgggatactcttccagccaggcggcaagggccgcccgctggctgctggcaaggctggggctgatctgctggtgggcctggaaccactcatgggcctgggtacccatcggggttaaattcagacggcgcgccagatcgtaattgctggtgccgacaaaccatggttcctgctgcagacgccgcacaataccttcctgcacctcgcgtgagaaacgacggcgggtgccgaagtccatcagacggaaggcgctcatgtcgaggtcagcggtcatggtggcgaagtcgcctagcttatgttccagcgtgttgagcgcctgatcgacgcccatctctggtgaacgatagcgatggaccaactcgcttatcaccgccagcagcgggacttcccacatgatggcttcccgccatgggccggtaaggcgaatgttcagcttaccattgtcattgctgaccgtgacctggctcgggtcatagcgaaaatcgcgcagccagttgaggtaatcctggcgaaaaaagggaagggtggacagccagcgatattcatcatcccgcagcctcaggtcgcgcatggactccacctgctcgcggatcgcgtcggcatagatgccgagcaggtcgtctccgcggcagcgaaactccgccgccacatgcacatcgccgtagcggtggaagacagcctgctgcatgtgcagcttataggcatccgtatcaagcagcgagtgcagtacaggagaagtgaattgtgtcatggtgcgcagtagcatcctctcactggagcgttccatcgaaaccaacgcggaaaatggaggcggagtatacctttattacccgactctgtcccgcgatggcgagcaatggtgacgctgacggtcatttgcgaggcctagtttaatatattgaacatggatcacaccacaagctttgcgtcgggtcgagggcatttcgtgccgcgagtgttaacaaaatgtagcgatttccgtgtttcacgttgaaaagatgaagattctgcatagcgcgattgacacaacaggaatagactgggacgacactttaccgaagatgctaaaggttttttatgacacaacagccccaagccaaataccgccacgactatcgtgcgccggagtatctgattagcgatatcgatttgacctttgacctggatgccgcaaaaaccgttgttacggccgagagcaaggtctcccgccacgcggctgcgtctgatgtgccattgcgcctggacggcgaagatctgaccctgatcgctctgcaggtgaacggccagccgtggagtgactataaagaagaaaacaatcagctggtgatcggcggcctgccggagcatttcaccctgaccatcgtcaatgagatcagcccggcggcgaacaccgcgctggaaggcctgtatcagtcaggcgaagcgctgtgcacccagtgcgaagcggaaggtttccgccatatcacctggtatctggaccgtccggatgtgctggcgcgctttaccaccaaaattatcgccgataaagcgaaatacccgttcctgctttccaacggcaaccgtatggcggaaggggagctggagaacggtcgtcactgggtacagtggcaggatccgttcccgaagccgtgctatctgtttgcgctggtggccggtgattttgacgtcctgcgcgattcattccgcacccgctctggccgcgaagtggcgctggagctgtacgtcgatcgcggcaacctcgatcgcgcgccctgggcgatgacctcgctgaaaaactctatgaagtgggatgaggagcgctttggcctcgagtacgacctcgatatctatatgattgtcgccgtcgacttctttaatatgggtgccatggagaacaaaggactcaacgtctttaactccaaatatgttctggctcgtaccgataccgccaccgataaagactacctcgatattgagcgcgtgattggtcatgaatatttccataactggaccggcaaccgcgtcacctgtcgtgactggttccagctcagcctgaaagaggggctgaccgtgttccgcgatcaggagttcagttccgacctcggctcacgggcggtgaaccgcatcaacaacgtgcgcaccatgcgcgggctgcagtttgccgaagacgccagcccgatggcgcacccgatccgtccggatatggttatcgagatgaacaacttctacaccctgacggtctatgaaaagggtgccgaagtgatccgcatgttgcacaccctgctgggtgaagaaaacttccagaaagggatgcagctgtactttgaacgccatgacggcagcgccgccacctgcgacgatttcgtgcaggcgatggaagatgcctctaacgtcgacctgtcgcacttccgcctctggtacagccagtccggtacgccaatcgtcaccgtgcatgacgactataatccggagaccgagcagtatacgttgaccatcagccagcgtacgccgccgaccgccgagcaggccgagaagcagccgctgcatatcccgtttgccattgagctgtacgataacgagggcaaggtgatccccctgcagaagggcggtcacccggtacacccggtgcttaatgtgacccaggccgagcagactttcgtcttcgataacgtttatttccagccggtgccggcgctgctgtgcgaattttcagcgcctgtgaaactggaatacaagtggagcgatcagcagctgaccttcctgatgcgtcacgcgcggaatgatttctcgcgctgggatgcggcgcagagcctgctggcgacttacatcaagctgaacgtcaaccgccatcagcaggggcagccgctgtcgctgccggtgcacgtagcggatgccttccgcgccatcctgctggatgagaagattgatccggcgctggccgctgagatcttaaccctgccgtcagccaacgaaatcgccgagatgttcgcgattatcgatccgatcgccatcgccgccgtgcgcgaagcgctcacccgcaccctggcgaacgaactggcggacgaattcctcgcggtttataacgccaataagctcgacagctatcgggtggagcacgccgatattggtaagcgcgctctgcgcaatacctgcctgcgctatctggcgtttgcggaaccgacgctgggcgataagctggtggcgacgcagtatcaccaggcagataacatgaccgacgcgctggccgccctgtcagcggcggttgccgctgagttgccgtgccgcgatgcgctgatgcaggagtacgatgacaaatggcatcaggacggtctggtgatggataagtggtttatcctgcagtccaccagcccggcagccaacgtggtggaaaccgtgcgcggtctgctgaaccaccgttcgttcagcatgagcaacccgaaccgtgtgcgctcgttaatcggcgctttcgccagcagcaacccggcggcgttccatgctgaagatggcagcggctatcagttcctggtggagatgctgaccgagcttaaccagcgtaacccgcaggtggcgtcgcgcctgattgagccgttgattcgtctgaagcgttatgatgagaagcgacaggcgctgatgcgcgccgcgctggagcagctgaaggggctggagaatctctctggcgacctgttcgagaaaatcagtaaggcgctggcgtaacggtggcataaccccgggctgcggcgcgccttgcgccctgtccgggttacccgttagcgtggtgatgttgtcgggcggcgcgatgcttacccgacctggaatacacggctgatttggcgttggtagcccggctgtgcaacccgcgagccggggacatgtcggatgacgatatgcccccgttcagatagcggacagttacgccggtcagccatgactaaacaaacgcggcgcacgctcgctgtcgccgcgtttcatcacccgatccagtacttcagcctccagctcggccagcttcgccgaaccggtgcgccgcggtcgcgggatatccacgcttaaatcgaggccaatcttcttctcttcaattaacagcacccgatcggccatggccaccgcttcactgacgtcgtgcgtgaccagcaggaccgtaaagccatgctcctgccacagggagacgatcagctcctgcatctccagacgggtgagggcatccagcgcccccagcggttcgtccagcagcagcaggcgcgggcgatggatcagcgcgcgggccagcgcaacgcgctgcttctgcccacccgacagcgcggccggccactcctgtgcgcggctttcaagtccgacgctggccaacgcctgcagggcggcgtcgcgccaggcgccttttagccccagccccacgttatcaatcactgttttccacggcagcaggcgcgcatcctgaaacatcatccgggtgtcgtcctggatcgccgccaggggcgtcgcgccagccagcagttcgccggcgtttggtttttccagacctgccagcaggcgcagcagggtacttttgccgccgccgctgcggcccaccaccgccacaaactggccgctgggaatatgcagatccagctcgttaagaatggtgttgtcgccatagcgtttcgtcaccccgttcagcagcagcgggatacctgggttgagacgggcagtgttcatgcgttagcctcctgaagatgatacgccggattccagcgcagccagagccgttccagcagctgggcgcagacgtcggccagtttgccaaggatggcgtaaaggatgatcgccactaccaccacgtcggtttgcagaaattcacgcgcgttcatcgccagataaccgatgccggcattcgccgagatagtttcggcgacaataagcgtcagccacatcagaccaagggcaaaacgcacgccgactataactgagggcagggcgccgggtaatatcacgtgacggaacagggcgaagccggataagccatagctgcgcgccatctcaaccagcccacggtcaatattgcggatcccgtgccaggtgttgatatagatcgggaacagggtgcccagcgagacaaggaagatcttggcggtctcatcgatgccgaaccacaagatcaccagcgggatcagcgccagatgcgggacattgcgcagcatctggatcgaggtatccagcagacgctcgccccagcgagacaggccgctgatcaggccgagtattagcccgatcgagccgccgatggcgaagccgaccagcgcccgccacgagctgatggccagatgctgccacagctcaccgctggccgagagggtccagaacgctttcaataccccctccggcgagggcagcacccgcgtcgacagccagccgacggacgaggccagctgccagacaatgaccgtccctaccggcagcagccagggggcgaggcgtaacaacaggggatgggttgattttgccatcacggtctcctcagctttgcgctactttacgcggaataaactcgttggcgaccgcttccccctgcagacgcaggttttgcggctgcgggatggacggcaccgcgacgtcaagcagggggaacagcagctctccgacccggtacgcctcttccagatgcggatagccggaaaagataaagctatcgatacccagcgcggcgtattcattgatcctttcggcaacggtggcggcatcgcccaccagcgcggtcccggcgccgccgcgcgctaaacccacgccagcccacaggttggggctgatttccagcttatcgcgtcgcccgttgtgcagggccgccatcctttgctgtccaacggagtcggttctggcgaaagccgcctgggcgcgggcgatcgtctcgtcgtcaagatgggagataaggctgtccgccgcctgccacgcttcctcgttggtttccctgacgatcacgtgcagacggatgccaaaacgcacctggcgaccatgccgggcggctttctctcgcacctgagctattttctctgccacctgggccggcggttctccccaggtaagataaagatcgacctgctcagcggccagctcctgcgccacctcagacgagccgccgaaatagagcggtggacgtggctgctgcagtggcggaaacagcagtttggcgtcgcgaacgcgctgatgcttgccgttaaaggtgacggtttctccctccatcagcttacgccagatgtgggtaaattcagccgaggcctcatagcgctcggtgtggtcgaggaagacgccgtcgcctgccagttcggcaggatcgctgccggtgaccagattgaacagcgcccggccgtttgacagccggtccagggtcgccgcctgacgcgcggccaccgtcggcgataccacgcttggcctgagggcgacaaggaacttcagccgctgcgtcaccgggatcattgaggccgcgaccagccacgcatcctcacaagagcgtccggtcgggatcagcacgccggtgaagcccagccgatccgccgtctgcgcgatttgctgcagatagccataatcgaccggacgggcaccctcttcggtacccagataacgaccatcaccatgggtcggtaaaaaccagaacatattcagactcatgatttcgctccttgtgtggcggtgggctgccagatgcgggcccggatatcaactttttttggcaccagcttgttctcgtagaacaggtctgccgtctgctgctggcgagcggcggtttcggcgctcaccggggtaaccgcggtggggggacgatggtccagatagctgtcgatcaccgcctccggtaagcccatcgttttcgccagcagcgtaatactttgcgcgcgttggctgtgggtcagggcatcggcctgagtaaaggtgtcgagtacgccttcaatgaaagcgccattgcgttcagcgtagggccgggaagcaagatagaaggatcccgtctgtttcagatctgttccgtcagtgagtacccggacgccgccctgcagcagcgcggcggagtagtacggatcccagatggcccatgcgtcgacattgccctgctggaaggcggcgcgcgcatcggcgggagcaaggtaaaccggctgaatatcgctaaatttcagacctgcgagctgcagggcgcgcagcagcagattgtgggagctggagcctttctggaaagcgacctttttcccttttaactcagcaacgttatgaatcgggctgccctgcgccaccaggatcacctccgccttgggcttgggcggctccgcgccgatatagaccaaatcggcgcctgccgcctgggcaaagataggcggaatatcgccggtactgccgatatcaatgctgccgacgttcagcgcctccagcatctgcggaccggccgggaactcaatccacgagatatgggtttgcggatagcgctgctccagcagctgatggctcttcgccagcaccatgctgacactgcctttttggtagccgatgcgcagagcgtcaggtgccgccggggcggcgtgacccagcgaagagaatagcagcagtccgcccagagtcagggcgcggagaggattaagcatgctccaccccacgcagagatgttaacgacggcgcacggctgctggggcgatgcagcgcctgccagaaggtctccagggcgtcatcaaggcgccgctgcagattcgcggtaaactgcggcttatgctggtaatcggtcacctggctgtcatcagcgaagacgccatggaggatctcctgggccttgagggcattcagcactggcttcagcgcgtagtccaccgccagcatgtgagcgatggtgccgccggtggccagcggcagcacaattttgccctccagcgctcgctcaggcagcaggtcgagcagcgttttcagcgcgccggagaacgaggctttatacaccggcgtggcgatgatcaggccatcagccccggccagctgttcattgagcgtctgcagcgccgggttgtcaaaacgagcgtacaggaggtcttccggggcaaagttctgcagatgccagtggcagacttcgatatcggcggcggtgagcgtctctctggcgtattccagcaaggcgctggaacgggaagggtaacgcgggctgcccgcaagcgtaatgacgcgcatctctctctccttataactaaatgtttgcatttatctataattgataacatttatagtgagtgtgacagagggccattatttccctaaatgatttatccgcggttagatagccgaaaagcgcataatggcgcgcggggtaggtaatcgtttgcgctgatgggggattttttgtcgcaggtcaattccctttccgcaacagatcgcacataatacgcccccggtttgcacaccgggaatccaggagagttcatgtactaccccttcgttcgtaaagccctttttcagctcgatcctgagcgcgctcatgaagttacctttcaacaattacgccgtgtcaccgggacgccgctggaaatgctggttcgccagaaggtaccggccaggcctgtcacctgcatggggctaacctttaaaaacccgctgggtctggcggccgggctggataaaaatggggaatgcattgacgcgctgggcgcgatggggtttggttcgattgagatcggcaccgtgacgccgcgtccgcagccgggcaacgataagccaaggatcttccgtctggttgatgccgagggattgatcaaccgcatgggctttaataaccatggcgtcgataacctggttgagaatgtgaaaaaggcgcattttgacggcgtgctgggtatcaatatcggcaaaaataaagatacgccggttgagcacgggaaagatgattacctgatttgtatggaaaaagtctatccgtacgccgggtatatcgccattaatatctcctcgccgaataccccagggctgcgcacgctgcaatacggcgaagcgctggatgatttactctccggtattaaaaataagcagctcgagctgcagcagaagcatcaaaaatatgtcccggtcgccgtaaagatcgcgccggatcttttgcctgaggaattgatccaggttgccgatagcctcgtgcgtcataatattgatggcgtgattgcaaccaataccaccctcgatcgttccctggttcagggaatgaaacattgcgatgagaccggcgggcttagcggtcgtccattacaattaaaaagcactgaaattatccgtatgctctccgctgagctgaatggccgtttgcctatcatcggcgtgggcggcattgattcggtgattgccgcgcgggaaaagattgccgccggggcatcgctggtgcagatctattctggatttatttttaaaggtccgccgctgattaaagaaattgttacccacatctaatcttttcctcctctgaatcccacccagggctttatttccggccctggttgttttatattccctcactgttgcttatttaaacattttagacttttcttaattttagaaaatattctgcggtaagtcgcaacaactttgcagaggcgtatgaaaggggacagggggaaaaatgcggattaaacctgacgataactggcgttggtattacgatgaagagcacgaccgcatgatgctcgatctggccaatggcatgttatttcgctcgcgcttcgcccggcgcatgctgactccggatgcctttgccccttctggattttgcgttgatgacgccgcgctctatttctcttttgaagaaaaatgtcgcgatctcgagctatcgaaagagcagcgggcggaattagtccttaacgcgctcaccgccatccgttttctcaaaccgcagatgccgaaaagctggcactttatcgcccatacccatcactggcagccgagcggcggcgacgccgcctgcgtttggctgagcgataccggcgagcaggtgaatttactggtggtggagccgggcgataacgccgcgctctgtctgttggctcagccgggtctcacccttgccggccgcgtcatgcagctgggcgatgtcataaaaatcatgaatgacagactgcagccggcgcagagcgcggtcagctacagtctggggcaggcggtttaaggcgccaggcgtagcgctgttttcggtacacagctgcaggcgagaatagtgccatctccggcaaccgcgtttttctttaacggactcacttctccctcttccagccggatgcggcagctgccgcagatccccgcccgacacgaatagggtacgcgaatgccctgttgttccagttgctccagcagcacctgctggttattgccggtaaactgttgaccctgccattcgatggcaaccgtagcctgctgctgcgcctcgggagccggggtatcgtcgctttcacctgccccgtaggctttcgccgggccgcgggtaaggatttccacttcatctcccacccggatcaccccgctgttgcgggcaatcaggttctggccaaaatcgacatcgccattgtccagcgcggtacgaaaacgctttaaggtttccagcggctccccggcgggatgcttctgaccgcgctccgggctgacggtggtaaaaatgcagcggctgcacggcttagcgacatcaaacaccacctcgccgatgcggatcactttccagctatcttcatcccaggccgccgcgccggtgaccacaaggttagggcgaaactgttctatgcttacgctggccgggcagcgctgttgcagatcgcgcagggaggcctcgttagccagcaggtaagggtagccgtcggcgaaggagagcggcaccgcatcatggcgctttacccggcgggttagctgcggccccagccagcgcagctggacatcgcgcttgaaaaagccgctgagccactggttaacggcggcgggcgcgatgagggcggtaaaatggttgccccagacttcggtcggctcggcctgcgtggcgaaatcactaaaacgcaccacggcgctgctgccgtccggtgcggtcaggtgaaggccatcatgcagcggcgccggaataaatttcaccatttgcggaaactggcgagcggtaataaaggtcccgtcggtttcggtgaccataaacaggcgatcgaaggccaggccgctgatatcagcaaaggcgtgggtcaggcctatgccgcgcatggatttaacaggatgaataaaaagtcgcgatagcgttaccatacgctgcctccgggttccaaaaataagcctataactttatgacatagggcacatattggctataatgcgcaccaattttctttaagtaaaagtgacgatatgaattctctgtttgccagtacggctcgtgggctggaagagctgttaaaaactgaactggaagggcttggcgcgacggactgccaggtagtccagggcggggtccattttcagggggatacgcgcctgctgtatcaaagcctgatgtggagccggctggcttcgcgcatcatgctgccgctgggcgaatgtcgcgtatacagcgatctggatctgtacctcggcgtacaggccattccgtggacggagatgttcaaccctggcgccaccttcgcggtgcattttagcggcctcaatgacgagatccgtaacagccagtacggcgcgctgaaggttaaagacgccattgtcgacagcttcacccgtaagaatctgccgcgcccgaacgtcgatcgtgagtcgcccgatctgcggatcaacgtctggctgaacaaagagacggcgcacatctcgctggatctgagcggcgaaggcctgcacctgcgcggctatcgcgatggtaccggaatggcgccgatcaaagaaaacctcgcggcggcgatcgtcatgcgctctggctgggtaccaggtacgccgctgctcgatccgatgtgcggctccggtaccctgctgattgaagcggcgatgctggcgaccgaccgcgcgccgggcctgcaccgcggccactggggctttggcggctgggcgcagcacgatgacgccatctggaaagaggtgaaggcggaagcgcaaacccgcgctcgtcagggattggcagcgtatgagtcacgcttctacggctcagacgtcgacgcgcgcgtaatcgagcgcgcgcgccgcaacgcccgccgcgccggcattggcgagctgatcgattttgacgtgaaagacgtcgcccaactgaacaacccgctaccgaaaggcccgtacgggacggtgatcagtaacccgccgtacggcgaacgtctggaaagcgagccagcgctgatcgctctgcacagcctgcttggccggataatgaaaagtcagttcggcggctggaacctgtcggtattcagcgcttcgccggagctgctgagttgcctgcagctgcgtgccgacaagcagtttaaagccaagaacggcccgctggactgcgtgcagaagaattatcacctggcggagagcgaaggcggcaagccggcgatgctggcggaggattttgctaaccgtctgcgtaaaaacctgaagaagtttgaaaaatgggcccgccaggaaggaattgaatgctatcgcctgtacgatgctgatctaccggaatacaacgtggccattgaccgctatgccgactgggtggtggtccaggagtatgccccgccgaaaaccgtcgacgcgcataaggcgcgccagcgtctgttcgacatcatcgctgcgactatcgccgtactggacatggcgcctaacaagttggtgctgaaaacccgtgaacggcagaaggggaaaaaccagtatcagaagatggcggagaagggcgactttattgaggtgcaggagtataacgcgcgcctgtgggtcaacctcaccgactacctggataccggtctgttcctcgaccaccgtatcgcccgtcgcatgctcggccagatgagtaaaggtaaggacttcctgaacctgttctcctataccggcagcgccagcgtccacgcaggcctcggcggtgcgcgatccaccaccacggtggatatgtcacgcacctacctggagtgggcggaacgcaacctgcgtctcaatggcctgaccggccgcgcgcatcgcctgatgcaggcggacgtgctgggttggctgcgggagagcaccgagcagttcgatctgatctttatcgatccgccgaccttttccaactccaaacgaatggaagatgcgtttgacgtccagcgcgatcacattcgcctgatgaccgatctaaaacgtctgctgcgtaaaggcggcaccattatgttctcgaataacaaacgcggtttccgtatggatcatgacgggctggcggcgcttggcctgaaggcgcaagagatttcgcaaaaaacgctgtcgcaggattttgcccgcaaccgtcagatccacaactgctggctgattaccgcagcctgaaaggaataaataatgtcactgattagtatgcacggcgcctggctttccttcagcgatgcgccgctgctggataatgccgagctgcatattgaagataacgaacgcgtctgcctcgtcggacgcaacggcgccggtaaatctaccctgatgaagatcctcaaccgcgaacaggggctggatgacggacgcatcatttatgaacaggacctgatcgtggcgcgtctgcagcaggatccgccgcggaacgttgctggtacggtgtacgattttgtcgccgaagggatcgccgagcaggcggcttatctgaaagcctaccatgacgtgtcgcatcaggtgatgaccgagccgagcgacaaaaatttaaatgaactggcgcgcctgcaggagcagctcgataacctgggactatggcagctggacagccgcattaacgaagtgattgagcagctgggccttgacgccaatgcgcagctggcgtcgctgtccggtggctggctacgtaaagcggcgctgggccgcgccctggtcagtgggccgcgcgtgctgctgttggatgagcccactaaccacctcgatatcgaaaccatcgactggctggaaggtttcctgaaaacctttaaaggcacgattatctttatttcgcatgaccgttcctttatccgcaatatggcgacgcgcattgtcgacctcgatcgtggcaagctggtgacctatccgggaaattacgatcagtatctcctcgataaagaagaagccctgcgggtcgaagaactgcagaatgcggaatttgaccgcaagctggcccaggaagaggtgtggatccgtcagggtatcaaagcgcgccggacccgtaacgaaggccgagtccgcgcgctgaaggcgatgcgccgcgagcgcggtgagcgccgggaagtgatgggcagcgcgaagatgcaggttgaggaggcttcccgttccggcaaaatcgtctttgagatggaaaacgtcaactatcaggttgacggcaaagtgctggtgaaggatttctccgcacagatccagcgcggcgacaagatcgccctgatcggccccaacggctgcgggaaaaccacgttgctgaagctgatgctcggccagctgcaggccgacagcgggcggatccatgttggcaccaagctggaggtcgcctacttcgaccagcaccgcgcggagttggatccggataaaacggtgatggacaacctggcggaaggcaaacaggaggtaatggttaacggtaaaccacgccatgtgctgggttatctacaggacttcctgttccatccaaaacgagcgatgaccccggtacgtgcgctttccggaggggaacgtaaccgcctgctgctggcccggctgttcctgaaacccagcaatctgctgatccttgatgaaccgactaacgacctcgatgttgaaacgctggagctgctggaagagctgatcgatggctatcaggggaccgtgatgctggtgagccacgatcgtcagtttgtcgacaataccgtgaccgagtgctggatcttcgaaggcggcggtcgtattggccagtacgtcggcggctatcacgacgcccgcggtcagcaggcccagtctttggcgcaaaagcagacggtcgttaaaaaaacgacggaagtcgctcagccaaaagcagaaactgtcaaacgcggcgggaacaaactaagctataacctgcagcgcgagctggaacaactgccgcagaagctggaggctctcgaggccgaactgcagacgctgcaggatcaggttgccgatcccgatttcttcgggcaaccgcacgatcgcacgcagcaggtgctggcgcagctggccgaagcggagcaggcgctggaagcggcctttgaacgctgggaatatctcgaaggattaaagaacggcgcctgagccgaggagttgtcatgtgcgatcatcatcatgctgcgcgacatattctatgtccccaatgtgatttgctggtggctttgccgcagcttgagcatcgccagaaagccgcctgcccgcgctgcggtacaacgttaaccaccacgtgggacgcgcctcgccagcgtcccacggcgtatgcgctggtcgcgctgtttatgctgctgctggccaacctgttcccttttatctatatgaaagtgggcggcatcagtagcgaaatagagctgctggaaattcccaacgtactgtttaccgaggattacgccagtctcgggactttctttttactctttgttcaattagtgccggcgttttgcctggtcaccattttgctgctggttaatcgggtcagaatgcctgccggcctgaagacgttccttgcgcgaattctctttcaactgaaaacctggggcatggcggagatctttcttgccggcgtgctggtgagcttcgtcaagctgatggcctacggtgatatcggcatcggtctgagctttgttccctggtgtatgttttgcctgctgcagttacgtacttttcagtgcgtcgaccgccgctggctatgggatgatattgcccccatgccggccattacccagccgctgaaggtcggggtgaccggtatccgtcaggggctgcgctcctgtgcctgctgtacggcggtgttgccggtcgatcagaccgcctgcccgcgctgtaacagtaaaggaacggcgcggcgcaaaaatagcctgcagtggacgctggcgctgctggtgacgtcatttatcctttatctccctgccaacattatgccgatcatgatcaccgatctgctgggcgataaaatgccatcgaccattatggccggggtgattttactgtggagcgaaggttcttatccggtggcgctggtgatctttatcgccagtattatggtgccgacgctgaagatgatcgctatcgcctggttgtgctggaacgccaacggcaacggcgcgcgagattcggagcgcatgcatctgatctatgaggtggtggaatttgttggccgctggtcaatgattgacgtttttgtcatcgccgtgctctctgcgctggtccgcatgggagggttaatgaatatctatccagccatcggcgcggtcatgtttgcgctggtggtggtgatgaccatgttttcagccatgacatttgatccccgtttactgtgggatcgtgagccagattcaagccatgaggaaatacaacaacatggaaaataagagcggagaagcgaaagtgcagaaggtgaagaactggtcaccggtgtggatcttccctatcgtcactgcgctgatcggggcatggatcctgttttatcattacagccatcaggggcctgaggtcacgctgatcaccaccaatgcggaagggattgaagggggaaaaacccggatcaagagccgcagcgtagacgttggggtggtggagagcgcgacgttgaccgacgatctcacccacgtggaaatcaaagcccgcctcaattccgggatgcagaagctgctgcacaacgattccgtcttctgggtggtaaagccgcaggttggccgcgaggggatcagcggtcttgggacattgttgtccggggcctatattgagcttcagccgggaacgaaaggttcggtgccagcgcagtatccgctactggattctccgccgctggcctcgccggatgccaaggggatccgtattctgctggaaagcagcaaggcgggccagctgtcgccgggcgatccggtgttgttccgcggctatcgcgtggggtcagtggaaaccagcaccttcgatacgcagaaacgtcgtataacttaccagctgttcatcaatgcgccgaacgatcgcctggtgaccaccaacgttcgtttctggaaagacagcgggatcgctgtagatttgacctcggcggggatgcgcgtcgagatgggctcgctgtcgacgctgtttggcggcggggtgagcttcgatattcctgaaggactggacctcggcgagccggtggcgaataaaacggaataccatctgtttgacgatcagaagagcatccaggattcagtctttaccgagcatatcgattacgtcatgttcttcaaagactcggttcgcggcctgcagccgggcgcgccggtggagttccgcggtatccgtctgggcaccgtcggcaaagtgccgttctttattccggggctgaagcagcgtttgaacgatgactatcgtattccagtggaagtgcgggttgaaccgcaacggctgattaatcagcttggcggcgatccgaatattcgcgcccacattgacgatctgatcaaccgcggactgcgcggctcgctgaaaaccggtaacctggtgaccggcgcgctgtatatcgatctcgacttctatccgaaggcgcccccgcgcgggaaaatacaggagtttaacggctatccgattatcccgaccatcagcggtggactggcacagatccagcagcgtctgatggatgcgctggataagattaataacctgccgattaatccgctgctggagcaggcgaccagtaccctggcgcagagcgagaagacgatgcagcacgtgcagaccacgctggataatctgaataagatcacctccagccagtcaatgcagcagctgcccgccgatatgcagacgacgctgcgtgagctgaaccgtagcatgcagggcttccagcctggctctgcggcctacaataagatggtggccgatatgcagcgtctggatcaggtgctgcgtgagctgcagccggttctgaaaacgctaaatgataagagcaatgcgctggtatttgaggcgaaggataaaaaagatccacagccgaagggagcgaaataatgaaaaaatggttactggcggcagccgtatgcgtactgacggcgtgcagtagcggcggggaaagcaagacatactatcagctaccggttgtgcagggcggcgcgcagagcgccgccagtcagggggcacgtctgctgtgggtagagcaggtcagcatcccggattatctggcgggtaacggggtggtctatcagaccaccgacgtgcagtatgtgatcgccaataataatctgtgggccagtccgctggatcagcagctgcgcactacgctggtggcaaatctcagccagcagttgcccggctgggtagtgtcgtcccagccgctggggagcgagcaggataccctcaacgttgcggtcaatggctttcatggtcgctatgacgggcgggttatcgttagcggtgagtggctgctgaagcatcagggacagctgattaagcgcccgtttaacatcgtcctcaggcaggaacaggatggttatgacgcgatggtcaagaccctggcgcaggcgtggagccaggaggcggctgccattgccagcgagcttaatcgtctgccataagtaaaattcatcataatgacctgccgcgcggttcacctgggccgcgcggcattttttttgccaggtcagttcgttaccggcggctgcgccgagcgaacaaaaaatgaactcttatataggtcacaaatatgacactggcgtgaattttgcgcattgacgttgccttcttttcgcggtattcgtaacccgtggctgcacaatttgcgaccactgttttcttttccaccagatcaaagaatgagggaaacgaggcatgaagagacaaaaacgagatcgcctggaacgggcacaccaacgcggatatcaggcgggtatcgcgggaagatcgaaagaaatgtgtccataccagagcctgaatcaacgctcatggtggctgggaggctggcgagaagccatggaggacagggtactaacggcctgacactgtctctttaaaaaagaagcctccgcatagcgggggcttcgccttttaatcgctactgaatgttatcagaaagcggaagtatcctggaacagacccactttcagatcgttcgcggtgtagatcagacgatcgtcaaccagcacttcaccatccgcaagtcccataatcagacgacggttaacaatgcgcttgaagtggatgcggtaggtgacttttttcgcggtcggcagaacctgaccggtgaatttcacttcgccaacgcccagcgcgcggcctttgccttcgccgcccagccagccaagatagaacccgaccagctgccacatagcatccaggcccaggcagcccggcatcaccggatcgccgataaagtggcaaccgaagaaccacaggtcaggattgatgtcgagttctgcctcaacataacctttatcgtagttaccaccggtttcggtcattttgatgacgcggtccatcatcagcatgtttggtgccggtaactgcgggcctttcgcgccgaacagttcaccacgaccagaggcaagaagatcttcttttgtataggattcgcgtttatctaccatgttttcagtaagccttattttaagttcgggacgcaggatagctaacacgtgtaagctgaacaagtccgatcagttagaacttgtcccacctaaccagcgtagcggccacggaaaacgatggcgagtctcttgctgggtcgcctgcgctatccgctcctgaatggtttgtcgcagcgtctgtccttcaccgtcccacatcagctgggtcaacatcggcagcgcttcggtaatatcgtcaatggcccagatagcaaactggttgtcggcaacggcctgacgtagctcgtggctcaggctgagatgacgaacgttggcggcagggataatcactccctgtttgccggttaaaccgcgctgctgacagatagtgaagaagccttcaattttctcgttcaggccgccgaccggctgcacgcgaccaaactggtcgacggagccggtgatcgcgatgctctgatttatcggtacgttggccagggcgctgattaaggcgcagagttccgccatggaggcgctgtcgccatccacttcactgtaggactgctcaaaggtcagcgaagcagtgaagggaagctgctgctccagctccagctcggacatcagaaaagcctgcatgatcatcatgcctttcgcatgaatgttaccgcccagctcggctttacgttcgacgtcgataaattcgccatcgccaatgtgcacgacgcagctgatgcgtgaaggttcaccgaacgcgcgtggatgaccggggaattcgatcaccgagagggcgttgatctgcccgacgcattcgccttcggtttcaatcaggatctgttcctgcaggatttcatcctgcatacgctccgccaggtagccttcacgccatacccggcgcgccagcatggtctgcatcgcttcgccggtaatctcttcgccttcgcagaaggcggcagcctcccgcagctggcgggttatccatagcggactgagcggcagggtctcctgatcgccggtatagcgcgttccctcatcgatcagcagaggccaggcatcggctgccgggcccggcagctccagctgctgcgcattctgccatacccactggcaccaggcctttagcgtgtcggcgtcagcaaactgcaaagtgtcttcatactcgctatagatcgcctgcgcagccagctccggctccatttcctggaaatcggccagcgattcgcgttcgcccaccaggatgattttcagactcagcggcatagagggaatgctgaccggcagcggacgcgattcatccatagaaagccagtcaaagcgctgacgagtcaccatatttttcagacgcacccacagcagcggttgcgccagcagtgtacgtagcgaaagcacaagcacgccgccgttggcctgatggaccagcccaggctcgagggtgattgcaccgttaaactggcgtacgcagccaaacagctgttccgcttctacccaatcggccatcacgaccggggcagtgctggcgaaattatcctcagcgccctgcgccggtgcgagcgtcacctgagcgtcggttacctcatagcggacgccgtaaagcggtgcggcaggctcgtgcagagtccgggtttcagccgccagccattgcagatattccggctcttcaggggctttcaccagcatgaaggaggagactgccggcgtgtacagcagctgctcaagcccatagaacaaacgcggctgcagatcgcccgagagggagggggccggatgggaaagttcagcttgagcaaacagcgcctggtaagcttccagatcaggcgcaaggtcggttcgggtcagtttcgtaatggtcaaagtcgctgttttttagttagatgtaaagcgcgcaattatacctgatgccgcgaccgagcacacggaggattatggttaccctgatgattacccggtcgcagacttcacgaataatgatttatattcagcacatcagaaaaaaactgatatcctgaaatgagttacacggtcacattgagatcgcaatgaaatatcaacaactggaaaatcttgaaagcggctggaaatggaaatatctggtaaagaagcaccgggaaggtgagctgattacccgctacattgaggccagcgctgcgcaagctgcggtagatgacttgctgacgctcgagaatgaacctgtgctggtgcatgcctggattgagcagcatatgaatccggcgctgatgaaccgcatgaagcagactatccgcgcgcgacggaaacgccattttaacgctgagcatcagcatacgcgtaagaagtc

(The sequence listing continues in the following parts.)
